(19) United States
(12) Patent Application Publication
(10) Pub. No.: US 2007/0292849 A1
(43) Pub. Date: Dec. 20, 2007

(54) Methods for Identifying Risk of Low Bmd and Treatments Thereof

(76) Inventors: Steven Mah, New York, NY (US); Carolyn R Hoyal-Wrightson, San Diego, CA (US); Stefan Kammerer, San Diego, CA (US); Matthew R Nelson, San Diego, CA (US); Andreas Braun, San Diego, CA (US); Rikard H. Reneland, Knivsta (SE)

Correspondence Address: GRANT ANDERSON LLP;C/O PORTFOLIOIP, PO BOX 52050, MINNEAPOLIS, MN, 55402, US

(21) Appl. No.: 10/578,392

(22) PCT Filed: Dec. 29, 2005
(86) PCT No.: PCT/US05/47411

§ 371 Date: Jun. 27, 2007

Related U.S. Application Data
(60) Provisional application No. 60/640,966, filed on Dec. 31, 2004.

(51) Int. Cl. C12Q 1/68

(52) U.S. Cl. 435/6

(57) ABSTRACT

Provided herein are methods for identifying a risk of low BMD in a subject, reagents and kits for carrying out the methods, methods for identifying candidate therapeutics for treating low BMD-related disorders, such as osteoporosis, and therapeutic and preventative methods applicable to osteoporosis. These embodiments are based upon an analysis of polymorphic variations in nucleotide sequences within the human genome.

### RELATED APPLICATIONS

[0001] This patent application claims the benefit of U.S. Provisional Patent Application No. 60/640,966 filed on 31 Dec. 2004, entitled “Methods For Identifying Risk Of Low BMD And Treatments Thereof,” naming Steven Mah et al. as inventors, and designated by attorney docket no. SEQ-4095-PV. This patent application is related to U.S. Provisional Patent Application Nos. 60/640,967 and 60/640,796, each filed on 31 Dec. 2004, entitled “Methods For Identifying Risk Of Low BMD And Treatments Thereof,” naming Steven Mah et al. as inventors, and designated by attorney docket nos. SEQ-4094-PV and SEQ-4096-PV, respectively. The content and subject matter of each of these patent applications is hereby incorporated by reference in its entirety, including all text and drawings, in jurisdictions providing for such incorporation.

### FIELD OF THE INVENTION

[0002] The invention relates to genetic methods for identifying susceptibility to low bone mineral density (BMD) and/or bone damage generally associated with human diseases, and in particular to osteoporosis, and treatments that specifically target the disease.

### BACKGROUND

[0003] Osteoporosis is a common disease characterized by low bone mineral density (BMD), deterioration of bone micro-architecture and increased risk of bone damage, such as fracture. Common types of osteoporosis include postmenopausal and senile osteoporosis, which generally occur later in life, e.g., 70+ years.

[0004] Osteoporosis is a major public health problem which affects quality of life and increases costs to health care providers. It is estimated that 44 million Americans and 100 million people worldwide are at risk for osteoporosis. In the United States today, 10 million individuals are estimated to already have the disease and almost 34 million more, or 55% of the people 50 years of age and older, have low bone mass, which puts them at increased risk of developing osteoporosis and related fractures. Of the 10 million Americans estimated to have osteoporosis, eight million are women and 2 million are men. These numbers are growing as the elderly population increases. It is estimated that by the middle of the next century the number of osteoporosis sufferers will double in the West, but may increase six-fold in Asia and South America. The estimated national direct expenditures (e.g., hospitals and nursing homes) for osteoporotic and associated fractures was $17 billion in 2001 ($47 million each day)—and the cost is rising (See National Osteoporosis Foundation; http://www.nof.org/osteoporosis/stats.htm).

[0005] Fracture is the most serious endpoint of osteoporosis, particularly fracture of the hip which affects up to 1.7 million people worldwide each year. One in two women and one in four men over age 50 will have an osteoporosis-related fracture in their lifetime. It is estimated that by the year 2050, the number of hip fractures worldwide will increase to over 6 million, as life expectancy and age of the population increase (See Spangler et al. “The Genetic Component of Osteoporosis Mini-review”; http:www.csa.com.osteointro.html).

[0006] Peak bone mass is mainly genetically determined, though dietary factors and physical activity can have positive effects. Peak bone mass occurs when skeletal growth ceases, after which time bone loss starts. In contrast to the positive balance that occurs during growth, in osteoporosis, the resorbed cavity is not completely refilled by bone and BMD decreases. Based on studies of family histories, twin studies, and racial factors, some attribute 50-60% of total bone variation (e.g., Bone Mineral Density to genetic effects and suggest there may be a predisposition for osteoporosis.

[0007] Osteoporosis can be considered a complex genetic trait with variants of several genes underlying the genetic determination of the variability of the phenotype. Low BMD is an important risk factor for fractures, the clinically most relevant feature of osteoporosis. Segregation analysis in families has shown that BMD is under polygenic control. In addition, biochemical markers of bone turnover have shown to have strong genetic components. Several candidate genes have been analyzed in relation to BMD, but the most widely studied gene in this respect, the vitamin D receptor (VDR) gene, explains only a small part of the genetic effect on BMD. Numerous studies, focusing on the BsmI allele of the vitamin D receptor gene have concluded that absence of the restriction site correlates with low bone mineral density.

### SUMMARY

[0008] It has been discovered that certain polymorphic variations in human genomic DNA are associated with the occurrence of low bone mineral density (BMD) and/or bone damage generally associated with human diseases, and in particular to osteoporosis. In particular, polymorphic variants in loci containing CETP, PROL4, GRID2, PDE4D or GPX3/TNIP1/TNIP1 regions in human genomic DNA have been associated with risk of low BMD.

[0009] Thus, featured herein are methods for identifying a subject at risk of low bone mineral density (BMD) and/or bone fracture, which indicates bone damage and related conditions such as osteoporosis in a subject. The methods comprise detecting the presence or absence of one or more of the polymorphic variations described herein in a human nucleic acid sample. In an embodiment, two or more polymorphic variations are detected and in some embodiments, 3 or more, or 4, 5, 6, 7, 8, 9, 10, 11, 12, 13, 14, 15, 16, 17, 18, 19 or 20 or more polymorphic variants are detected.

[0010] Also featured are nucleic acids that include one or more polymorphic variations associated with occurrence of low BMD, as well as polypeptides encoded by these nucleic acids. In addition, provided are methods for identifying candidate therapeutic molecules for osteoporosis and other low BMD-related disorders, as well as methods for treating osteoporosis in a subject by identifying a subject at risk of low BMD and treating the subject with a suitable prophylactic, treatment or therapeutic molecule.

[0011] Also provided are compositions comprising a cell from a subject suffering from low BMD or at risk of low BMD, and a CETP, PROL4, GRID2, PDE4D or GPX3/TNIP1/TNIP1 nucleic acid, with a RNAi, siRNA, antisense DNA or RNA, or ribozyme nucleic acid designed from a CETP, PROL4, GRID2, PDE4D or GPX3/TNIP1 nucleotide sequence, or a nucleic acid that hybridizes to such a nucleotide sequence under stringent conditions. In an embodiment, the RNAi, siRNA, antisense DNA or RNA, or ribozyme nucleic acid is designed from a CETP, PROL4, GRID2, PDE4D or GPX3/TNIP1 nucleotide sequence that includes one or more low BMD associated polymorphic variations, and in some instances, specifically interacts with such a nucleotide sequence. Further, provided are arrays of nucleic acids bound to a solid surface, in which one or more nucleic acid molecules of the array have a CETP, PROL4, GRID2, PDE4D or GPX3/TNIP1 nucleotide sequence, or a fragment or substantially identical nucleic acid thereof, or a complementary nucleic acid of the foregoing. Featured also are compositions comprising a cell from a subject having low BMD or at risk of low BMD and/or a CETP, PROL4, GRID2, PDE4D or GPX3/TNIP1 polypeptide, with an antibody that specifically binds to the polypeptide. In an embodiment, the antibody specifically binds to an epitope in the polypeptide that includes a non-synonymous amino acid modification associated with low BMD (e.g., results in an amino acid substitution in the encoded polypeptide associated with low BMD). In an embodiment, the antibody specifically binds to an epitope comprising an arginine corresponding to position 120 in a PROL4 polypeptide (SEQ ID NO: 12).

### BRIEF DESCRIPTION OF THE DRAWINGS

[0012] FIGS. 1-4 show the position of each SNP in the chromosome on the x-axis, while the y-axis provides the negative logarithm of the p-value comparing the estimated allele frequency in the cases to that of the control group. Also shown in the figures are exons and introns of the genes in approximate chromosomal positions. More specifically, FIG. 1 shows proximal SNPs in a CETP region in genomic DNA. FIG. 2 shows proximal SNPs in a PROW region in genomic DNA. FIG. 3 shows proximal SNPs in a GRID2 region in genomic DNA. FIG. 4 shows proximal SNPs in a PDE4D region in genomic DNA. FIG. 5 shows proximal SNPs in a GPX3/TNIP1 region in genomic DNA.

### DETAILED DESCRIPTION

[0013] It has been discovered that polymorphic variants described in a CETP, PROL4, GRID2, PDE4D and GPX3/TNIP1 loci in human genomic DNA are associated with occurrence of low BMD in subjects. Thus, detecting genetic determinants in and around this locus associated with an increased risk of low BMD occurrence can lead to early identification of a risk of low BMD, or its associated disorders such as osteoporosis, and early application of preventative and treatment measures. Associating the polymorphic variants with low BMD also has provided new targets for diagnosing low BMD, for prognosing osteoporosis, and methods for screening molecules useful in osteoporosis treatments and osteoporosis preventatives.

[0014] Cholestery ester transfer protein (CETP) transfers cholesteryl esters between lipoproteins. The transfer of insoluble cholesteryl esters among lipoprotein particles (HDL to LDL) by CETP is a step in normal cholesterol homeostasis. The lipoprotein phenotype of CETP deficiency, which is characterized by increased levels of HDL and decreased levels of low density lipoprotein (LDL), appears to have antiatherogenic potential. Bone mineral density is reduced by atherogenic diets (increased LDL/HDL ratios), possibly as a result of a shift in the balance of bone marrow stromal cells away from osteoblasts and towards adipocytes, which could result in reduced bone synthesis during remodeling. Lipoproteins may directly regulate bone density via the LRP5, the low-density lipoprotein receptor related protein 5. LRP5 was cloned from an osteoblast cDNA library (Dong, et al.: Biochem Biophys Res Commun. 1998 Oct. 29; 251(3):784-90) and mouse knockouts show a reduced BMD phenotype (Kato et. al.: J Cell Biol. 2002 Apr. 15; 157(2):303-14). A G171V mutation in LRP5 resulted in increased numbers of osteoblasts, increased AP activity, and increased trabecular number and thickness in mice (Babij et al.: J Bone Miner Res. 2003 June; 18(6): 960-74). The human G171V mutation was found to have the same phenotype, presumably by increasing WNT signaling in osteoblasts (Mao et. al.: Mol Cell. 2001 April; 7(4):801-9). Overall, there is evidence that lipoprotein profiles play a role in osteoblast differentiation. Provided is a method for treating osteoporosis or low bone mineral density by modulating a CETP function in a subject suffering from osteoporosis or low bone mineral density. CETP inhibitors and methods of making them are described in U.S. Pat. No. 6,586,613 (Substituted tetrahydronaphthaline and analogous compounds); U.S. Pat. No. 6,562,976 (4-phenyltetrahydrochinoline utilized as an inhibitor of the cholesterol ester transfer protein); U.S. Pat. No. 6,387,929 (4-heteroaryl-tetrahydroquinolines and their use as inhibitors of the cholesterin-ester transfer protein); U.S. Pat. No. 6,291,477 (Tetrahydroquinolines, processes for their preparation, pharmaceutical compositions containing them, and their use to prevent or treat hyperlipoproteinaemia); U.S. Pat. No. 6,218,431 (Substituted biphenyls); U.S. Pat. No. 6,207,671 (Cycloalkano-pyridines); U.S. Pat. No. 6,127,383 (2-aryl-substituted pyridines); U.S. Pat. No. 6,121,330 (5-Hydroxyalkyl substituted phenyls and their use in medicaments for the treatment of arteriosclerosis and hyperlipoproteinaemia); U.S. Pat. No. 6,069,148 (Cycloalkano-pyridines); U.S. Pat. No. 6,063,788 (Bicyclic-fused pyridines); U.S. Pat. No. 5,932,587 (Heterocyclic-fused pyridines); U.S. Pat. No. 5,925,645 (2-aryl-substituted pyridines); U.S. Pat. No. 6,753,346 (CETP activity inhibitor); U.S. Pat. No. 6,706,881 (Methods for preparing CETP inhibitors); U.S. Pat. No. 6,689,897 (Intermediates of CETP inhibitors); U.S. Pat. No. 6,600,045 (Methods for preparing CETP inhibitors); U.S. Pat. No. 6,573,383 (Preparation of anhydrous CETP inhibitor); U.S. Pat. No. 6,555,113 (Modulation of cholesteryl ester transfer protein (CETP) activity); U.S. Pat. No. 6,426,365 (CETP activity inhibitors); U.S. Pat. No. 6,410,022 (Modulation of cholesteryl ester transfer protein (CETP) activity); U.S. Pat. No. 6,410,020 (Monoclonal antibody reactive to human CETP and assay method for human CETP); U.S. Pat. No. 6,140,474 (Monoclonal antibody reactive with human-origin CETP and method of quantifying human-origin CETP); U.S. Pat. No. 5,948,435 (Methods of regulating CETP genes, enzymes and other compound, and pharmaceutical composition therefor); U.S. Pat. No. 5,519,001 (CETP inhibitor polypeptide antibodies against the synthetic polypeptide and prophylactic and therapeutic anti-atherosclerosis treatments); and U.S. Pat. No. 5,512,548 (CETP inhibitor polypeptide, antibodies against the synthetic polypeptide and prophylactic and therapeutic anti-atherosclerosis treatments).

[0015] PROL4, also known as Lacrimal proline rich protein (LPRP) is a member of the proline-rich secreted protein family and contains a conserved acidic N-terminal region. It has 45.5% amino acid homology to a salivary Parotid acidic protein (PRH1). PRH1 and related proline-rich (salivary) proteins act as potent inhibitors of hydroxyapatite crystal growth and bind calcium with a strength that suggests that they are important in maintaining the concentration of ionic calcium in saliva. The N-terminal region of salivary proline-rich proteins, which is also the region of strongest homology to PROL4, mediates this binding. It is expected that PROL4 plays a role in maintaining calcium levels during bone remodeling, and that a loss of function of PROL4 facilitates bone loss. Provided is a method of treating low BMD or osteoporosis by increasing expression of PROL4 or otherwise increasing levels of active PROL4 in a patient suffering from low BMD or osteoporosis.

[0016] Human glutamate receptor delta-2 (GRID2) is a member of the family of ionotropic glutamate receptors that are excitatory neurotransmitter receptors in mammalian brain. A point mutation in mouse GRID2, associated with the phenotype named “lurcher” in the heterozygous state, leads to ataxia resulting from selective, cell-autonomous apoptosis of cerebellar Purkinje cells during postnatal development. Mice homozygous for this mutation die shortly after birth from massive loss of mid- and hindbrain neurons during late embryogenesis. Glutamate receptors have been detected in osteoblasts and osteoclasts and may regulate bone resorption. Provided is a method of treating low bone mineral density or osteoporosis by modulating GRID2 function in a patient suffering from low BMD or osteoporosis.

[0017] PDE4D encodes cyclic AMP-dependent phosphodiesterase 4D. Phosphodiesterases are a superfamily of enzymes involved in degradation of cyclic adenosine monophosphate (cAMP) and cyclic guanosine monophosphate (cGMP) (Manganiello V C, et al.: Arch Biochem Biophys 1995, 322(1):1-13; and Beavo J A: Physiol Rev 1995, 75(4):725-748). cAMP and cGMP are important second messengers participating in the response of various cells to hormones. In osteoblasts, cAMP produced in response to parathyroid hormone or prostaglandins regulates osteoblastic differentiation (Farndale R W, et al. Biochem J 1988, 252(1):263-268; Kumegawa M, et al. Calcif Tissue Int 1984, 36(1):72-76; Ishizuya T, et al. J Clin Invest 1997, 99(12):2961-2970; and Partridge N C, et al. J Cell Biochem 1994, 55(3):321-327), which leads to increases in cancellous bone volume as indicated by experiments in animal models (Jee W S, et al. Bone 1987, 8(3):171-178; High W B: et al. Bone 1987, 8(6):363-373; Reeve J: et al. J Bone Miner Res 1996, 11(4):440-445; and Finkelstein J S, et al. N Engl J Med 1994, 331(24): 1618-1623). Intracellular levels of cAMP are regulated by G protein-coupled adenylyl cyclase (Casperson G F, Bourne H R: Annu Rev Pharmacol Toxicol 1987, 27:371-384), and degradation is mediated by the phosphodiesterases. The phosphodiesterase superfamily consists of seven families, PDE1-7, distinguished by substrate specificity, chromatographic behavior during purification, and affinity for biochemical activators and inhibitors. Of these, the PDE4 family is specific for cAMP and is selectively inhibited by rolipram. Four PDE4 genes, 4A, 4B, 4C, and 4D, have been cloned from rat and humans, all of which are predicted to have multiple protein products due to alternate spicing of RNAs. PDE4 inhibitors have been shown to increase bone formation in normal mice (Kinoshita T, et al. Bone 2000, 27(6):811-817) and to ameliorate loss of bone mass in animal models of osteopenia (Miyamoto K, et al. Biochem Pharmacol 1997, 54(5):613-617; and Waki Y, et al. Jpn J Pharmacol 1999, 79(4):477-483). PDE4A and PDE4D are expressed in two common mouse osteoblastic cell lines, ST2 and MC3T3-E1, that represent different stages in the osteoblast differentiation pathway (Wakabayashi S, et al. J Bone Miner Res 2002, 17(2):249-256). PDE4 inhibition with rolipram increased BMP2-induced alkaline phosphatase activity, a marker of early osteoblast differentiation in ST2 cells. Furthermore, rolipram increased the expression of alkalic phosphatase, osteopontin, collagen type I and osteocalcin in the same osteoblast precursor cells (Wakabayashi S, et al. J Bone Miner Res 2002, 17(2):249-256).

[0018] Provided herein is a method for treating osteoporosis or low bone mineral density by modulating a PDE4 function in a human suffering from osteoporosis or low bone mineral density. Modulation of PDE4D by PDE4D inhibitors may increase bone formation and treat an osteoporotic condition. PDE4D inhibitors and methods of making them are described in the following U.S. Pat. Nos. 6,218,400 (Treatment method using a cGMP-Specific PDE inhibitor), 5,891,896 (Tri-substituted phenyl derivatives useful as PDE IV inhibitors), 5,849,770 (Tri-substituted phenyl derivatives useful as PDE IV inhibitors), 5,712,298 (Fluoroalkoxy-substituted benzamides and their use as cyclic nucleotide phosphodiesterase inhibitors), 5,491,147 (Tri-substituted phenyl derivatives and their use in pharmaceutical compositions and methods of treatment). Also provided is a method of treating osteoporosis by decreasing expression of PDE4D or otherwise decreasing levels of active PDE4D in a subject suffering from low BMD. Provided also is a method of targeting pertinent information or administering preventative or therapeutic treatments to a subject based on a subject's PDE4D genotype.

[0019] SNP rs869975 is contained within the GPX3 gene, and the TNIP3 gene may not be ruled out due to linkage disequilibrium; therefore the GPX3/TNIP3 region is considered associated with low BMD. The GPX3 gene encodes the Plasma glutathione peroxidase 3 precursor. Glutathione peroxidase catalyzes the reduction of hydrogen peroxide, organic hydroperoxide, and lipid peroxides by reduced glutathione and functions in the protection of cells against oxidative damage. This enzyme, found mainly in the cytosol of mammalian cells, is unusual in its content of a selenocysteine residue in its active site that is encoded by a TGA opal codon. Selenium deficiency causes bone loss and might contribute to lower BMD. Osteoblasts produce glutathione peroxidase, possibly as a defense against hydrogen peroxide produced by osteoclasts during bone remodeling and thus may contribute to lower BMD. Provided is a method for treating osteoporosis or low bone mineral density by modulating a GPX function in a human suffering from osteoporosis or low bone mineral density.

[0020] In the TNIP1/NAF1/ABIN-1 pathway, NAF1 was identified by a yeast two-hybrid screen as an interacting protein to the HIV protein, Nef. Subsequently, it was found to be an A20-binding protein that is critical for the A20-mediated negative feedback regulation of NF-kappa B activation in response to tumor necrosis factor (TNF). As TNF is a critical effector of the pathogenesis of rheumatoid arthritis (RA), Gallagher et. al. (FEBS Lett. 2003 Sep. 11; 551(1-3):8-12), tested TNF-alpha-modulated gene expression in cultured primary human synoviocytes in vitro. Genes upregulated included TNIP1 and implicate TNIP1 as a potential modulator of TNF-alpha bioactivity in RA. The differentiation and functions of osteoclasts are stimulated and regulated by osteoblast/stromal cell derived factors, such as receptor activator of NFKB ligand (RANKL). Provided is a method for treating osteoporosis or low bone mineral density by modulating a TINIP function in a human suffering from osteoporosis or low bone mineral density.

[0021] Low BMD and Sample Selection

[0022] The present invention is applicable to any disease in which low BMD and/or bone fracture is a factor, and is therefore particularly concerned with diseases such as osteoporosis. Low BMD is defined by the World Health Organization as 2.5 standard deviations below the age-matched mean of bone mineral density for a given population. Bone damage may be defined as any form of structural damage such as fractures or chips of the bone, and degradation or deterioration of the bone other than normal wear and tear resulting from low bone mineral density or another cause. Such low BMD and/or bone damage is associated with osteoporosis.

[0023] Osteoporosis, or porous bone, is a disease characterized by low bone mass and structural deterioration of bone tissue, leading to bone fragility and an increased susceptibility to fractures, especially of the hip, spine and wrist. In general, there are two types of osteoporosis: primary and secondary. Approximately 90% of all osteoporosis cases is idiopathic “primary osteoporosis”. Such primary osteoporosis includes postmenopausal osteoporosis, age-associated osteoporosis (affecting a majority of individuals over the age of 70 to 80), and idiopathic osteoporosis affecting middle-aged and younger men and women. “Secondary osteoporosis” is the result of an identifiable disease process or agent.

[0024] For some osteoporotic individuals, the loss of bone tissue is sufficiently great so as to cause mechanical failure of the bone structure. Bone fractures often occur, for example, in the hip and spine of women suffering from postmenopausal osteoporosis. Kyphosis (abnormally increased curvature of the thoracic spine) may also result.

[0025] The mechanism of bone loss in osteoporotics is believed to involve an imbalance in the process of “bone remodeling”. Bone remodeling occurs throughout life, renewing the skeleton and maintaining the strength of bone. This remodeling involves the erosion and filling of discrete sites on the surface of bones, by an organized group of cells called “basic multicellular units” or “BMUs”. BMUs primarily consist of “osteoclasts”, “osteoblasts”, and their cellular precursors. In the remodeling cycle, bone is resorbed at the site of an “activated” BMU by an osteoclast, forming a resorption cavity. This cavity is then filled with bone by an osteoblast.

[0026] Normally, in adults, the remodeling cycle results in a small deficit in bone, due to incomplete filling of the resorption cavity. Thus, even in healthy adults, age-related bone loss occurs. However, in osteoporotics, there is an increase in the number of BMUs that are activated. This increased activation accelerates bone remodeling, resulting in abnormally high bone loss.

[0027] Preferred methods for the treatment of osteoporosis include an initial diagnostic step to determine the presence of the disorder. Initial diagnostic steps include determination of bone mass and rate of bone remodeling. The rate of bone remodeling can be determined by the measurement of biochemical markers. See, for example, Hui et al., “The Contribution of Bone Loss to Postmenopausal Osteoporosis” Osteoporosis Int. 30 (1990). Diagnosis of those at risk of developing osteoporosis also allows more effective preventive measures. Part of diagnosis includes specialized tests called bone density tests that measure bone density in various sites of the body. Such methods include the measurement of the radiodensity of skeletal radiographs, quantitative computerized tomography, single energy photon absorptiometry, and dual-energy photon absorptiometry. Diagnostic techniques among those useful herein are described in W. A. Peck et al., Physician's Resource Manual on Osteoporosis (1987), published by the National Osteoporosis Foundation. A bone density test can detect the presence of low BMD before a fracture occurs, predict your chances of fracturing in the future, determine rate of bone loss, and monitor response to treatment.

[0028] Based in part upon selection criteria set forth above, individuals having low BMD can be selected for genetic studies. Also, individuals having a family history of low BMD or diagnosed with osteoporosis often are selected for genetic studies. Other selection criteria can include: a tissue or fluid sample derived from an individual characterized as Caucasian; sample derived from an individual of Caucasian paternal and maternal descent, case samples derived from individuals diagnosed with osteoporosis; control samples derived from individuals with normal or high BMD levels and no family history of osteoporosis; and sufficient genomic DNA for all allelotyping and genotyping reactions performed during the study. Phenotype information may included pre- or post-menopausal, familial predisposition, country or origin of mother and father, diagnosis with osteoporosis (date of primary diagnosis, age of individual as of primary diagnosis, osteoporosis-related fracture), biochemical measurements of markers of bone resorption (bone-specific alkaline phosphatase, urinary C-telopeptide of type I collagen, serum osteocalcin), current medication status (thyroid medication, hormone replacement therapy, steroid usage, bisphosphonates and cytotoxic agents for rheumatic diseases). Samples that meet the inclusion criteria and do not meet the exclusion criteria may be added to appropriate pools based on gender and disease status.

[0029] Polymorphic Variants Associated with Low BMD

[0030] A genetic analysis provided herein linked low BMD with polymorphic variant nucleic acid sequences in the human genome. As used herein, the term “polymorphic site” refers to a region in a nucleic acid at which two or more alternative nucleotide sequences are observed in a significant number of nucleic acid samples from a population of individuals. A polymorphic site may be a nucleotide sequence of two or more nucleotides, an inserted nucleotide or nucleotide sequence, a deleted nucleotide or nucleotide sequence, or a microsatellite, for example. A polymorphic site that is two or more nucleotides in length may be 3, 4, 5, 6, 7, 8, 9, 10, 11, 12, 13, 14, 15 or more, 20 or more, 30 or more, 50 or more, 75 or more, 100 or more, 500 or more, or about 1000 nucleotides in length, where all or some of the nucleotide sequences differ within the region. A polymorphic site is often one nucleotide in length, which is referred to herein as a “single nucleotide polymorphism” or a “SNP.”

[0031] Where there are two, three, or four alternative nucleotide sequences at a polymorphic site, each nucleotide sequence is referred to as a “polymorphic variant” or “nucleic acid variant.” Where two polymorphic variants exist, for example, the polymorphic variant represented in a minority of samples from a population is sometimes referred to as a “minor allele” and the polymorphic variant that is more prevalently represented is sometimes referred to as a “major allele.” Many organisms possess a copy of each chromosome (e.g., humans), and those individuals who possess two major alleles or two minor alleles are often referred to as being “homozygous” with respect to the polymorphism, and those individuals who possess one major allele and one minor allele are normally referred to as being “heterozygous” with respect to the polymorphism. Individuals who are homozygous with respect to one allele are sometimes predisposed to a different phenotype as compared to individuals who are heterozygous or homozygous with respect to another allele.

[0032] In genetic analysis that associate polymorphic variants with low BMD, samples from individuals having low BMD and individuals not having low BMD often are allelotyped and/or genotyped. The term “allelotype” as used herein refers to a process for determining the allele frequency for a polymorphic variant in pooled DNA samples from cases and controls. By pooling DNA from each group, an allele frequency for each SNP in each group is calculated. These allele frequencies are then compared to one another. The term “genotyped” as used herein refers to a process for determining a genotype of one or more individuals, where a “genotype” is a representation of one or more polymorphic variants in a population.

[0033] A genotype or polymorphic variant may be expressed in terms of a “haplotype,” which as used herein refers to two or more polymorphic variants occurring within genomic DNA in a group of individuals within a population. For example, two SNPs may exist within a gene where each SNP position includes a cytosine variation and an adenine variation. Certain individuals in a population may carry one allele (heterozygous) or two alleles (homozygous) having the gene with a cytosine at each SNP position. As the two cytosines corresponding to each SNP in the gene travel together on one or both alleles in these individuals, the individuals can be characterized as having a cytosine/cytosine haplotype with respect to the two SNPs in the gene.

[0034] As used herein, the term “phenotype” refers to a trait which can be compared between individuals, such as presence or absence of a condition, a visually observable difference in appearance between individuals, metabolic variations, physiological variations, variations in the function of biological molecules, and the like. An example of a phenotype is occurrence of low BMD or clinically diagnosed osteoporosis.

[0035] Researchers sometimes report a polymorphic variant in a database without determining whether the variant is represented in a significant fraction of a population. Because a subset of these reported polymorphic variants are not represented in a statistically significant portion of the population, some of them are sequencing errors and/or not biologically relevant. Thus, it is often not known whether a reported polymorphic variant is statistically significant or biologically relevant until the presence of the variant is detected in a population of individuals and the frequency of the variant is determined. Methods for detecting a polymorphic variant in a population are described herein, specifically in Example 2. A polymorphic variant is statistically significant and often biologically relevant if it is represented in 5% or more of a population, sometimes 10% or more, 15% or more, or 20% or more of a population, and often 25% or more, 30% or more, 35% or more, 40% or more, 45% or more, or 50% or more of a population.

[0036] A polymorphic variant may be detected on either or both strands of a double-stranded nucleic acid. Also, a polymorphic variant may be located within an intron or exon of a gene or within a portion of a regulatory region such as a promoter, a 5′ untranslated region (UTR), a 3′ UTR, and in DNA (e.g., genomic DNA (gDNA) and complementary DNA (cDNA)), RNA (e.g., mRNA, tRNA, and rRNA), or a polypeptide. Polymorphic variations may or may not result in detectable differences in gene expression, polypeptide structure, or polypeptide function.

[0037] It was determined that polymorphic variations associated with an increased risk of low BMD existed in CETP, PROL4, GRID2, PDE4D and GPX3 nucleotide sequences. In the CETP locus, polymorphic variants at positions selected from the group consisting of rs7500979, rs2217332, rs8044804, rs2270835, rs2133783, rs247609, rs952440, rs881598, rs2291955, rs2518054, rs866038, rs1436425, rs173537, rs247611, rs166017, rs173538, rs193694, rs7205692, rs8048746, rs247618, rs183130, rs6499863, rs4783961, rs3816117, rs711752, rs708272, rs1864163, rs4369653, rs1864165, rs891141, rs891143, rs7205804, rs5885, rs1532625, rs1532624, rs289712, rs7499892, rs5883, rs289714, rs158480, rs289717, rs4344729, rs289718, rs289719, rs2033254, rs4784744, rs291044, rs8053613, rs5881, rs5880, rs7198026, rs5882, rs8045701, rs289741, rs1801706, rs289742, rs289743, rs289746, rs172337, rs289747, rs1566439, rs7205459, rs289749, rs289751, rs8059220, rs8058353, rs289735, rs289737, rs291042, rs1875236, rs821466, rs821465, rs4275846, rs289707, rs821463, rs289706, rs1167741, rs2052880, rs1167742, rs1183256, rs1651665, rs1651666, rs4784751, rs1651667, rs8052091, rs1684574, rs1684575, rs1672865, rs821470, rs1549669, rs291040 and rs289754 were tested for association with low BMD. Polymorphic variants at the following positions were associated with low BMD: rs166017, rs193694, rs7205804, rs1801706, rs7205459 and rs821465. At these positions in SEQ ID NO:1, a thymine at position 14328, a thymine at position 14996, a guanine at position 37336, a guanine at position 50109, a thymine at position 57618, and a guanine at position 68805 were associated with low BMD.

[0038] In the PROL4 locus, polymorphic variants at positions selected from the group consisting of rs523051, rs693620, rs2588349, rs2588350, rs619381, rs3759252, rs3759251, rs2418107, rs7303054, rs1838345, rs620878, rs2537817, rs1548803, rs667123, rs1838346, rs2159903, rs3944035, rs3741845, rs2110096, rs759055, rs589377, rs7960194, rs7978242, rs601051, rs4262797, rs2215714, rs1373434, rs2215715, rs612456, rs612808, rs689118, rs597468, rs592864, rs640372, rs7966559, rs654834, rs4763216, rs668521, rs669503, rs3906864, rs3906863, rs7957888, rs9300230, rs7306214, rs763839, rs2418105, rs666841, rs3851578, rs7138797, rs7295252, rs2418106, rs7299578, rs621112, rs3863320, rs1373432, rs1047699, rs1063193, rs2232959, rs2227296, rs1548804, rs2232958, rs2232957, rs2232956, rs1972571, rs3759250, rs3759249, rs1541525, rs2098248, rs2900550, rs7302130, rs4763583, rs4360778, rs1607695, rs1607694, rs2192139, rs7978300, rs7397871, rs4763217, rs2159900, rs10772370, rs7398682, rs2900551, rs2900552, rs2418214, rs2418215, rs965243, rs1117548, rs1520225, rs1520226, rs1520227, rs971919, rs2159901, rs2159902, rs2110099, rs7314847, rs7296003, rs4281556, rs4763219, rs3851579, rs3851580, rs1049119, rs2298866, rs2298865, rs2298864, rs2298863, rs3180393, rs2070837, rs7956204, rs2418216, rs3741844, rs4262798, rs2418217, rs2418218, rs7137492, rs2110100, rs1013312, rs4579993, rs1013313, rs7397106, rs2215716, rs2192140, rs4763589, rs1468697, rs2070837, rs3180393 and rs2298865 were tested for association with low BMD. Polymorphic variants at the following positions were associated with an increased risk of low BMD: rs2588350, rs619381, rs620878, rs759055, rs4262797, rs612808, rs3906863, rs7957888, rs763839, rs2418105, rs666841, rs3851578, rs7299578, rs621112, rs1047699, rs1548804, rs2232956, rs1520227 and rs2215716. At these positions in SEQ ID NO:2, a cytosine at position 2424, a cytosine at position 3625, a guanine at position 7097, an adenine at position 15688, a guanine at position 22861, a cytosine at position 24138, a cytosine at position 32459, an adenine at position 35151, a guanine at position 36930, an adenine at position 37490, a cytosine at position 38432, an adenine at position 38688, a guanine at position 42665, an adenine at position 43038, a cytosine at position 49075, an adenine at position 50773, an adenine at position 52107, a cytosine at position 75246, and a guanine at position 93715 were associated with risk of low BMD.

[0039] In the GRID2 locus, polymorphic variants at positions selected from the group consisting of rs1433661, rs1485009, rs7681947, rs1816432, rs1485018, rs1485017, rs7438397, rs6834311, rs1368717, rs1017391, rs2870701, rs7679839, rs1385404, rs1368716, rs4693316, rs1905707, rs1905708, rs1905709, rs3912442, rs2082553, rs6831638, rs5860329, rs2870702, rs2870703, rs1948016, rs6835836, rs1994253, rs1905710, rs1485019, rs978191, rs1385405, rs7694361, rs1905711, rs1905734, rs1485012, rs1485013, rs4692981, rs7670552, rs7670932, rs7688091, rs7440540, rs2171000, rs2870704, rs7655758, rs7661436, rs7662289, rs7667044, rs7691929, rs5860330, rs901013, rs901012, rs901011, rs1948018, rs2870705, rs1948017, rs1905733, rs1385408, rs1385409, rs1385410, rs1485026, rs1485027, rs2904483, rs1385406, rs1905732, rs2046418, rs2200377, rs1905731, rs1905730, rs975713, rs6820985, rs7670441, rs6810794, rs7676623, rs1154861, rs1032125, rs1485022, rs1485024, rs3913651, rs4693319, rs1872383, rs2200376, rs7668090, rs7692930, rs967096, rs6822249, rs6532405, rs1017897, rs7672674, rs7694568, rs2904484, rs7340830, rs1485033, rs2870706, rs1905729, rs4693320, rs6848749, rs6532406, rs6532407, rs1905728, rs6819866, rs1905727, rs7674069, rs1905724, rs1905723, rs1485020 and rs6814101 were tested for association with low BMD. Polymorphic variants at the following positions were associated with an increased risk of low BMD: rs1433661, rs7679839, rs1368716, rs1905707, rs1905708, rs1994253, rs1485019, rs1905734, rs1485012, rs7670552, rs7691929, rs1948018, rs1948017, rs1485024, rs7694568, rs4693320, rs6848749, rs6532406, rs6532407 and rs6819866. At these positions in SEQ ID NO:3, a thymine at position 206, a guanine at position 8612, an adenine at position 9285, a thymine at position 11866, a guanine at position 11958, a cytosine at position 28773, a thymine at position 29876, a cytosine at position 35588, a guanine at position 37663, a thymine at position 39375, a cytosine at position 43705, an adenine at position 48962, a cytosine at position 49110, an adenine at position 65050, a cytosine at position 78331, a thymine at position 85405, a guanine at position 86441, an adenine at position 86967, a cytosine at position 87121, and an adenine at position 90969 were associated with risk of low BMD.

[0040] In the PDE4D locus, polymorphic variants at positions selected from the group consisting of rs6886495, rs6450498, rs1472456, rs4700315, rs4700316, rs7714708, rs7710479, rs2968013, rs2968014, rs2968015, rs1391648, rs2055297, rs2055296, rs3989138, rs4700317, rs2036220, rs7727206, rs7723432, rs1546221, rs4479801, rs4395595, rs4395596, rs4699932, rs2936201, rs7356672, rs2936200, rs1909296, rs7703131, rs7445308, rs3087748, rs4321723, rs2968016, rs5868151, rs1874858, rs1874857, rs7712922, rs4631140, rs4469166, rs1078369, rs1078368, rs2968006, rs2968005, rs2936190, rs2409613, rs4415048, rs2968004, rs2968003, rs2968002, rs2936191, rs1498610, rs6874662, rs3060393, rs7729722, rs7733884, rs7714489, rs7735570, rs2936193, rs2291851, rs2291852, rs1498602, rs1995166, rs1498603, rs1498604, rs1498605, rs1948651, rs4699934, rs4700319, rs2279737, rs7720361, rs7706419, rs1006431, rs1353747, rs1498606, rs1353748, rs1553113, rs2968012, rs2968011, rs1498608, rs2936189, rs1498609, rs2968019, rs6891238, rs2968010, rs2968009, rs2936203, rs1498601, rs1498600, rs1498599, rs2936202, rs7730070, rs6450501, rs6450502, rs6889456, rs6894618, rs7706044, rs7707541, rs7712076, rs6892860, rs6867053, rs7737269, rs6864156, rs950447, rs2936196, rs7719347, rs1391649, rs1391650, rs1391651, rs1353749, rs10682149, rs5868153, rs1363882, rs2409626, rs2968018, rs954740, rs986067, rs6869400, and rs5010782 were tested for association with low BMD. Polymorphic variants at the following positions were associated with an increased risk of low BMD: rs7714708, rs1498602, rs4699934, rs1006431, rs1353747, rs1498608, rs1498609, rs2968010, rs2936202 and rs1391649. At these positions in SEQ ID NO:4, an adenine at position 1599, a cytosine at position 39626, a thymine at position 40356, a thymine at position 43555, a thymine at position 44066, a thymine at position 49652, a cytosine at position 51103, an adenine at position 57173, a guanine at position 63980, and an adenine at position 82591 were associated with risk of low BMD.

[0041] In the GPX3/TNIP1 locus, polymorphic variants at positions selected from the group consisting of rs1478398, rs1478397, rs1160114, rs1160113, rs1382323, rs1160112, rs7709870, rs7710643, rs7730467, rs6579829, rs6579830, rs6579831, rs6896232, rs1351131, rs1038074, rs1478396, rs6880512, rs4958858, rs4958431, rs4958432, rs6898463, rs4958859, rs4130064, rs4130065, rs4133119, rs4958860, rs4958861, rs4437356, rs4958868, rs1478400, rs6889375, rs1600159, rs6875892, rs4608909, rs2345000, rs4516840, rs2054440, rs707141, rs707142, rs841236, rs707143, rs70144, rs6869405, rs707145, rs707146, rs707148, rs707150, rs5872184, rs3763015, rs2042235, rs3763013, rs2042236, rs1946234, rs1946235, rs1946236, rs8177402, rs8177403, rs8177404, rs8177405, rs8177406, rs8177407, rs8177408, rs8177409, rs6888961, rs8177410, rs8177411, rs8177412, rs8177413, rs870407, rs870406, rs6873202, rs8177414, rs8177415, rs3805435, rs8177416, rs3792799, rs3792798, rs3828599, rs8177417, rs3792797, rs8177418, rs8177419, rs8177420, rs8177421, rs4958872, rs3792796, rs8177422, rs8177423, rs4958434, rs8177424, rs8177425, rs8177426, rs8177427, rs8177429, rs6889737, rs3792795, rs8177430, rs8177431, rs4958873, rs8177432, rs8177433, rs8177434, rs8177435, rs3763011, rs8177436, rs8177437, rs4958874, rs8177439, rs8177440, rs8177441, rs8177442, rs8177443, rs869975, rs869976, rs8177444, rs8177445, rs7721469, rs8177446, rs7704191, rs8177447, rs11548, rs2230303, rs7722386, rs8177448, rs8177449, rs2070593, rs8177450, rs8177451, rs8177452, rs8177453, rs8177454, rs3763010, rs8177455, rs8177456, rs736775, rs2277940, rs8177458, rs8177834, rs3924, rs2233312, rs2233311, rs2233310, rs2233309, rs4958875, rs2233308, rs2233307, rs2233306, rs2233305, rs2233304, rs2233303, rs2233302, rs2287719, rs2287720, rs7727034, rs7727250, rs7709800, rs3840312, rs2287721, rs6875293, rs3805434, rs2080982, rs2080983, rs2287722, rs2233301, rs2233300, rs4958876, rs2233299, rs2233298, rs2287723, rs2161359, rs7734456, rs4292439, rs4958878, rs6862024, rs3834819, rs2233297, rs2233296, rs2233295, rs2233294, rs7713028, rs7713223, rs7713567, rs888989, rs2233293, rs3749657, rs2233292, rs2112635, rs871269, rs3792794, rs6579837, rs3805433, rs5872186, rs2233291, rs2233290, rs2233289, rs4958435, rs4958880, rs1422673, rs2042234, rs3805432, rs3805431, rs2233288, rs2233287, rs3815720, rs3792792, rs3792791, rs2303018, rs3792790, rs4958436, rs2233286, rs2233285, rs7732451, rs2233284, rs1422674, rs3792789, rs4562032, rs6865077, rs1559126, rs3792788, rs1559127, rs3792786, rs6880110, rs6861227, rs3805430, rs1862364, rs4958881, rs3792785, rs6869605, rs6870205, rs4246047, rs4958882, rs3792784, rs3792783 and rs5872188 were tested for association with low BMD. Polymorphic variants at the following positions were associated with an increased risk of low BMD: rs1478398, rs1160114, rs1160113, rs1160112, rs4958858, rs4958431, rs6898463, rs4958859, rs4958860, rs4608909, rs707144, rs2042235, rs3763013, rs2042236, rs8177404, rs8177426, rs8177427, rs8177429, rs3792795, rs4958873, rs8177437, rs869975, rs8177447, rs11548, rs2277940, rs8177834, rs2233311, rs2233302, rs7727034, rs7727250, rs3805434, rs7734456, rs7713028, rs7713223, rs888989, rs3792794, rs4958880, rs1422673, rs3805432 and rs4958436. At these positions in SEQ ID NO:5, an adenine at position 231, a cytosine at position 582, a guanine at position 589, an adenine at position 1066, a thymine at position 5621, a guanine at position 5735, a cytosine at position 6658, a cytosine at position 7901, a thymine at position 15803, a cytosine at position 25599, a thymine at position 31203, a thymine at position 41624, a guanine at position 41671, an adenine at position 41825, a cytosine at position 43294, an adenine at position 46650, an adenine at position 46721, a guanine at position 46808, a guanine at position 47512, an adenine at position 47806, a guanine at position 49097, a guanine at position 50082, a thymine at position 51166, a cytosine at position 51493, a thymine at position 53187, an adenine at position 53699, a thymine at position 53929, a cytosine at position 58808, a cytosine at position 59187, a cytosine at position 59361, a cytosine at position 64049, a guanine at position 70882, an adenine at position 74131, a cytosine at position 74406, a cytosine at position 74740, a guanine at position 78432, a cytosine at position 82187, a cytosine at position 82698, an adenine at position 83214 and a thymine at position 86539 were associated with risk of low BMD.

[0042] Based in part upon analyses summarized in FIGS. 1-5, regions with significant association have been identified in loci associated with low BMD. Any polymorphic variants associated with low BMD in a region of significant association can be utilized for embodiments described herein. The following table reports such regions, where “begin” and “end” designate the boundaries of the region according to chromosome positions within the genomic sequence provided in SEQ ID Nos:1-5. The locus, the chromosome on which the locus resides and an incident polymorphism in the locus also are noted.

TABLE 1
COMBINED ASSOCIATION RANGES

| Incident SNP | Locus | Chromosome | Begin | End | Size |
|---|---|---|---|---|---|
| rs1801706 | CETP | 16q21 | 14328 | 68805 | 54477 |
| rs1047699 | PROL4 | 12p13 | 2424 | 93715 | 91291 |
| rs1948017 | GRID2 | 4q22 | 206 | 90969 | 90763 |
| rs1498608 | PDE4D | 5q12 | 1599 | 82591 | 80992 |
| rs869975 | GPX3/TNIP1 | 5q23 | 231 | 86539 | 86308 |

[0043] Additional Polymorphic Variants Associated with Low BMD

[0044] Also provided is a method for identifying polymorphic variants proximal to an incident, founder polymorphic variant associated with low BMD. Thus, featured herein are methods for identifying a polymorphic variation associated with low BMD that is proximal to an incident polymorphic variation associated with low BMD, which comprises identifying a polymorphic variant proximal to the incident polymorphic variant associated with low BMD, where the incident polymorphic variant is in a CETP, PROL4, GRID2, PDE4D or GPX3/TNIP1 nucleotide sequence. The nucleotide sequence often comprises a polynucleotide sequence selected from the group consisting of (a) a polynucleotide sequence of SEQ ID NO's:1-5; (b) a polynucleotide sequence that encodes a polypeptide having an amino acid sequence encoded by a polynucleotide sequence of SEQ ID NO's:1-5; and (c) a polynucleotide sequence that encodes a polypeptide having an amino acid sequence that is 90% or more identical to an amino acid sequence encoded by a nucleotide sequence of SEQ ID NO's:1-5 or a polynucleotide sequence 90% or more identical to the polynucleotide sequence of SEQ ID NO's:1-5. The presence or absence of an association of the proximal polymorphic variant with low BMD then is determined using a known association method, such as a method described in the Examples hereafter. In an embodiment, the incident polymorphic variant is a polymorphic variant associated with low BMD described herein. In another embodiment, the proximal polymorphic variant identified sometimes is a publicly disclosed polymorphic variant, which for example, sometimes is published in a publicly available database. In other embodiments, the polymorphic variant identified is not publicly disclosed and is discovered using a known method, including, but not limited to, sequencing a region surrounding the incident polymorphic variant in a group of nucleic samples. Thus, multiple polymorphic variants proximal to an incident polymorphic variant are associated with low BMD using this method.

[0045] The proximal polymorphic variant often is identified in a region surrounding the incident polymorphic variant. In certain embodiments, this surrounding region is about 50 kb flanking the first polymorphic variant (e.g. about 50 kb 5′ of the first polymorphic variant and about 50 kb 3′ of the first polymorphic variant), and the region sometimes is composed of shorter flanking sequences, such as flanking sequences of about 40 kb, about 30 kb, about 25 kb, about 20 kb, about 15 kb, about 10 kb, about 7 kb, about 5 kb, or about 2 kb 5′ and 3′ of the incident polymorphic variant. In other embodiments, the region is composed of longer flanking sequences, such as flanking sequences of about 55 kb, about 60 kb, about 65 kb, about 70 kb, about 75 kb, about 80 kb, about 85 kb, about 90 kb, about 95 kb, or about 100 kb 5′ and 3′ of the incident polymorphic variant.

[0046] In certain embodiments, polymorphic variants associated with low BMD are identified iteratively. For example, a first proximal polymorphic variant is associated with low BMD using the methods described above and then another polymorphic variant proximal to the first proximal polymorphic variant is identified (e.g., publicly disclosed or discovered) and the presence or absence of an association of one or more other polymorphic variants proximal to the first proximal polymorphic variant with low BMD is determined.

[0047] The methods described herein are useful for identifying or discovering additional polymorphic variants that may be used to further characterize a gene, region or loci associated with a condition, a disease (e.g., osteoporosis), or a disorder. For example, allelotyping or genotyping data from the additional polymorphic variants may be used to identify a functional mutation or a region of linkage disequilibrium. In certain embodiments, polymorphic variants identified or discovered within a region comprising the first polymorphic variant associated with low BMD are genotyped using the genetic methods and sample selection techniques described herein, and it can be determined whether those polymorphic variants are in linkage disequilibrium with the first polymorphic variant. The size of the region in linkage disequilibrium with the first polymorphic variant also can be assessed using these genotyping methods. Thus, provided herein are methods for determining whether a polymorphic variant is in linkage disequilibrium with a first polymorphic variant associated with low BMD, and such information can be used in prognosis/diagnosis methods described herein.

[0048] Isolated Nucleic Acids

[0049] Featured herein are isolated CETP, PROL4, GRID2, PDE4D or GPX3/TNIP1 nucleic acid variants depicted in SEQ ID NO's:1-10, and substantially identical nucleic acids thereof. A nucleic acid variant may be represented on one or both strands in a double-stranded nucleic acid or on one chromosomal complement (heterozygous) or both chromosomal complements (homozygous)).

[0050] As used herein, the term “nucleic acid” includes DNA molecules (e.g., a complementary DNA (cDNA) and genomic DNA (gDNA)) and RNA molecules (e.g., mRNA, rRNA, siRNA and tRNA) and analogs of DNA or RNA, for example, by use of nucleotide analogs. The nucleic acid molecule can be single-stranded and it is often double-stranded. The term “isolated or purified nucleic acid” refers to nucleic acids that are separated from other nucleic acids present in the natural source of the nucleic acid. For example, with regard to genomic DNA, the term “isolated” includes nucleic acids which are separated from the chromosome with which the genomic DNA is naturally associated. An “isolated” nucleic acid is often free of sequences which naturally flank the nucleic acid (i.e., sequences located at the 5′ and/or 3′ ends of the nucleic acid) in the genomic DNA of the organism from which the nucleic acid is derived. For example, in various embodiments, the isolated nucleic acid molecule can contain less than about 5 kb, 4 kb, 3 kb, 2 kb, 1 kb, 0.5 kb or 0.1 kb of 5′ and/or 3′ nucleotide sequences which flank the nucleic acid molecule in genomic DNA of the cell from which the nucleic acid is derived. Moreover, an “isolated” nucleic acid molecule, such as a cDNA molecule, can be substantially free of other cellular material, or culture medium when produced by recombinant techniques, or substantially free of chemical precursors or other chemicals when chemically synthesized. As used herein, the term “gene” refers to a nucleotide sequence that encodes a polypeptide.

[0051] The nucleic acid often comprises a part of or all of a nucleotide sequence in SEQ ID NO's:1-5, or a substantially identical sequence thereof. Such a nucleotide sequence sometimes is a 5′ and/or 3′ sequence flanking a polymorphic variant described above that is 5-1000 nucleotides in length, or in some embodiments 5-500, 5-100, 5-75, 5-50, 5-45, 5-40, 5-35, 5-30, 5-25 or 5-20 nucleotides in length. Other embodiments are directed to methods of identifying a polymorphic variation at one or more positions in a nucleic acid (e.g., genotyping at one or more positions in the nucleic acid), such as at a position corresponding to rs1801706 in the CETP gene, rs1047699 in the PROL4 gene, rs1948017 in the GRID2 gene, rs1498608 in the PDE4D gene, or rs869975 in the GPX3 gene.

[0052] Also included herein are nucleic acid fragments. These fragments often are a nucleotide sequence identical to a nucleotide sequence of SEQ ID NO's:1-10, a nucleotide sequence substantially identical to a nucleotide sequence of SEQ ID NO's:1-10, or a nucleotide sequence that is complementary to the foregoing. The nucleic acid fragment may be identical, substantially identical or homologous to a nucleotide sequence in an exon or an intron in a nucleotide sequence of SEQ ID NO's:1-5, and may encode a domain or part of a domain of a polypeptide. Sometimes, the fragment will comprises one or more of the polymorphic variations described herein as being associated with low BMD. The nucleic acid fragment is often 50, 100, or 200 or fewer base pairs in length, and is sometimes about 300, 400, 500, 600, 700, 800, 900, 1000, 1100, 1200, 1300, 1400, 1500, 2000, 3000, 4000, 5000, 10000, 15000, or 20000 base pairs in length. A nucleic acid fragment that is complementary to a nucleotide sequence identical or substantially identical to a nucleotide sequence in SEQ ID NO's:1-5 and hybridizes to such a nucleotide sequence under stringent conditions is often referred to as a “probe.” Nucleic acid fragments often include one or more polymorphic sites, or sometimes have an end that is adjacent to a polymorphic site as described hereafter. CETP nucleic acid fragments sometimes encode the mature protein from positions 182 to 1609 of the mRNA sequence (SEQ ID NO: 6), for example.

[0053] An example of a nucleic acid fragment is an oligonucleotide. As used herein, the term “oligonucleotide” refers to a nucleic acid comprising about 8 to about 50 covalently linked nucleotides, often comprising from about 8 to about 35 nucleotides, and more often from about 10 to about 25 nucleotides. The backbone and nucleotides within an oligonucleotide may be the same as those of naturally occurring nucleic acids, or analogs or derivatives of naturally occurring nucleic acids, provided that oligonucleotides having such analogs or derivatives retain the ability to hybridize specifically to a nucleic acid comprising a targeted polymorphism. Oligonucleotides described herein may be used as hybridization probes or as components of prognostic or diagnostic assays, for example, as described herein.

[0054] Oligonucleotides are typically synthesized using standard methods and equipment, such as the ABI™3900 High Throughput DNA Synthesizer and the EXPEDITE™ 8909 Nucleic Acid Synthesizer, both of which are available from Applied Biosystems (Foster City, Calif.). Analogs and derivatives are exemplified in U.S. Pat. Nos. 4,469,863; 5,536,821; 5,541,306; 5,637,683; 5,637,684; 5,700,922; 5,717,083; 5,719,262; 5,739,308; 5,773,601; 5,886,165; 5,929,226; 5,977,296; 6,140,482; WO 00/56746; WO 01/14398, and related publications. Methods for synthesizing oligonucleotides comprising such analogs or derivatives are disclosed, for example, in the patent publications cited above and in U.S. Pat. Nos. 5,614,622; 5,739,314; 5,955,599; 5,962,674; 6,117,992; in WO 00/75372; and in related publications.

[0055] Oligonucleotides may also be linked to a second moiety. The second moiety may be an additional nucleotide sequence such as a tail sequence (e.g., a polyadenosine tail), an adapter sequence (e.g., phage M13 universal tail sequence), and others. Alternatively, the second moiety may be a non-nucleotide moiety such as a moiety which facilitates linkage to a solid support or a label to facilitate detection of the oligonucleotide. Such labels include, without limitation, a radioactive label, a fluorescent label, a chemiluminescent label, a paramagnetic label, and the like. The second moiety may be attached to any position of the oligonucleotide, provided the oligonucleotide can hybridize to the nucleic acid comprising the polymorphism.

[0056] Uses of Nucleic Acid Sequence

[0057] Nucleic acid coding sequences (e.g., SEQ ID NO: 7-12) may be used for diagnostic purposes for detection and control of polypeptide expression. Also, included herein are oligonucleotide sequences such as antisense RNA, small-interfering RNA (siRNA) and DNA molecules and ribozymes that function to inhibit translation of a polypeptide. Antisense techniques and RNA interference techniques are known in the art and are described herein.

[0058] Ribozymes are enzymatic RNA molecules capable of catalyzing the specific cleavage of RNA. The mechanism of ribozyme action involves sequence specific hybridization of the ribozyme molecule to complementary target RNA, followed by endonucleolytic cleavage. For example, hammerhead motif ribozyme molecules may be engineered that specifically and efficiently catalyze endonucleolytic cleavage of RNA sequences corresponding to or complementary to CETP, PROL4, GRID2, PDE4D or GPX3/TNIP1 nucleotide sequences. Specific ribozyme cleavage sites within any potential RNA target are initially identified by scanning the target molecule for ribozyme cleavage sites which include the following sequences, GUA, GUU and GUC. Once identified, short RNA sequences of between fifteen (15) and twenty (20) ribonucleotides corresponding to the region of the target gene containing the cleavage site may be evaluated for predicted structural features such as secondary structure that may render the oligonucleotide sequence unsuitable. The suitability of candidate targets may also be evaluated by testing their accessibility to hybridization with complementary oligonucleotides, using ribonuclease protection assays.

[0059] Antisense RNA and DNA molecules, siRNA and ribozymes may be prepared by any method known in the art for the synthesis of RNA molecules. These include techniques for chemically synthesizing oligodeoxyribonucleotides well known in the art such as solid phase phosphoramidite chemical synthesis. Alternatively, RNA molecules may be generated by in vitro and in vivo transcription of DNA sequences encoding the antisense RNA molecule. Such DNA sequences may be incorporated into a wide variety of vectors which incorporate suitable RNA polymerase promoters such as the T7 or SP6 polymerase promoters. Alternatively, antisense cDNA constructs that synthesize antisense RNA constitutively or inducibly, depending on the promoter used, can be introduced stably into cell lines.

[0060] DNA encoding a polypeptide also may have a number of uses for the diagnosis of diseases, including low BMD, resulting from aberrant expression of a target gene described herein. For example, the nucleic acid sequence may be used in hybridization assays of biopsies or autopsies to diagnose abnormalities of expression or function (e.g., Southern or Northern blot analysis, in situ hybridization assays).

[0061] In addition, the expression of a polypeptide during embryonic development may also be determined using nucleic acid encoding the polypeptide. As addressed, infra, production of functionally impaired polypeptide is the cause of various disease states, such as osteoporosis. In situ hybridizations using polypeptide as a probe may be employed to predict problems related to low BMD. Further, as indicated, infra, administration of human active polypeptide, recombinantly produced as described herein, may be used to treat disease states related to functionally impaired polypeptide. Alternatively, gene therapy approaches may be employed to remedy deficiencies of functional polypeptide or to replace or compete with dysfunctional polypeptide.

[0062] Expression Vectors, Host Cells, and Genetically Engineered Cells

[0063] Provided herein are nucleic acid vectors, often expression vectors, which contain a CETP, PROL4, GRID2, PDE4D or GPX3/TNIP1 nucleotide sequence or a substantially identical sequence thereof. As used herein, the term “vector” refers to a nucleic acid molecule capable of transporting another nucleic acid to which it has been linked and can include a plasmid, cosmid, or viral vector. The vector can be capable of autonomous replication or it can integrate into a host DNA. Viral vectors may include replication defective retroviruses, adenoviruses and adeno-associated viruses for example.

[0064] A vector can include a CETP, PROL4, GRID2, PDE4D or GPX3/TNIP1 nucleotide sequence in a form suitable for expression of an encoded target polypeptide or target nucleic acid in a host cell. A “target polypeptide” is a polypeptide encoded by a CETP, PROL4, GRID2, PDE4D or GPX3/TNIP1 nucleotide sequence or a substantially identical nucleotide sequence thereof. The recombinant expression vector typically includes one or more regulatory sequences operatively linked to the nucleic acid sequence to be expressed. The term “regulatory sequence” includes promoters, enhancers and other expression control elements (e.g., polyadenylation signals). Regulatory sequences include those that direct constitutive expression of a nucleotide sequence, as well as tissue-specific regulatory and/or inducible sequences. The design of the expression vector can depend on such factors as the choice of the host cell to be transformed, the level of expression of polypeptide desired, and the like. Expression vectors can be introduced into host cells to produce target polypeptides, including fusion polypeptides.

[0065] Recombinant expression vectors can be designed for expression of target polypeptides in prokaryotic or eukaryotic cells. For example, target polypeptides can be expressed in E. coli, insect cells (e.g., using baculovirus expression vectors), yeast cells, or mammalian cells. Suitable host cells are discussed further in Goeddel, Gene Expression Technology: Methods in Enzymology 185, Academic Press, San Diego, Calif. (1990). Alternatively, the recombinant expression vector can be transcribed and translated in vitro, for example using T7 promoter regulatory sequences and T7 polymerase.

[0066] Expression of polypeptides in prokaryotes is most often carried out in E. coli with vectors containing constitutive or inducible promoters directing the expression of either fusion or non-fusion polypeptides. Fusion vectors add a number of amino acids to a polypeptide encoded therein, usually to the amino terminus of the recombinant polypeptide. Such fusion vectors typically serve three purposes: 1) to increase expression of recombinant polypeptide; 2) to increase the solubility of the recombinant polypeptide; and 3) to aid in the purification of the recombinant polypeptide by acting as a ligand in affinity purification. Often, a proteolytic cleavage site is introduced at the junction of the fusion moiety and the recombinant polypeptide to enable separation of the recombinant polypeptide from the fusion moiety subsequent to purification of the fusion polypeptide. Such enzymes, and their cognate recognition sequences, include Factor Xa, thrombin and enterokinase. Typical fusion expression vectors include pGEX (Pharmacia Biotech Inc; Smith & Johnson, Gene 67: 31-40 (1988)), pMAL (New England Biolabs, Beverly, Mass.) and pRIT5 (Pharmacia, Piscataway, N.J.) which fuse glutathione S-transferase (GST), maltose E binding polypeptide, or polypeptide A, respectively, to the target recombinant polypeptide.

[0067] Purified fusion polypeptides can be used in screening assays and to generate antibodies specific for target polypeptides. In a therapeutic embodiment, fusion polypeptide expressed in a retroviral expression vector is used to infect bone marrow cells that are subsequently transplanted into irradiated recipients. The pathology of the subject recipient is then examined after sufficient time has passed (e.g., six (6) weeks).

[0068] Expressing the polypeptide in host bacteria with an impaired capacity to proteolytically cleave the recombinant polypeptide is often used to maximize recombinant polypeptide expression (Gottesman, S., Gene Expression Technology: Methods in Enzymology, Academic Press, San Diego, Calif. 185: 119-128 (1990)). Another strategy is to alter the nucleotide sequence of the nucleic acid to be inserted into an expression vector so that the individual codons for each amino acid are those preferentially utilized in E. coli (Wada et al., Nucleic Acids Res. 20: 2111-2118 (1992)). Such alteration of nucleotide sequences can be carried out by standard DNA synthesis techniques.

[0069] When used in mammalian cells, the expression vector's control functions are often provided by viral regulatory elements. For example, commonly used promoters are derived from polyoma, Adenovirus 2, cytomegalovirus and Simian Virus 40. Recombinant mammalian expression vectors are often capable of directing expression of the nucleic acid in a particular cell type (e.g., tissue-specific regulatory elements are used to express the nucleic acid). Non-limiting examples of suitable tissue-specific promoters include an albumin promoter (liver-specific; Pinkert et al., Genes Dev. 1: 268-277 (1987)), lymphoid-specific promoters (Calame & Eaton, Adv. Immunol. 43: 235-275 (1988)), promoters of T cell receptors (Winoto & Baltimore, EMBO J. 8: 729-733 (1989)) promoters of immunoglobulins (Banerji et al., Cell 33: 729-740 (1983); Queen & Baltimore, Cell 33: 741-948 (1983)), neuron-specific promoters (e.g., the neurofilament promoter; Byrne & Ruddle, Proc. Natl. Acad. Sci. USA 86: 5473-5477 (1989)), pancreas-specific promoters (Edlund et al., Science 230: 912-916 (1985)), and mammary gland-specific promoters (e.g., milk whey promoter; U.S. Pat. No. 4,873,316 and European Application Publication No. 264,166). Developmentally-regulated promoters are sometimes utilized, for example, the murine hox promoters (Kessel & Gruss, Science 249: 374-379 (1990)) and the α-fetopolypeptide promoter (Campes & Tilghman, Genes Dev. 3: 537-546 (1989)).

[0070] A CETP, PROL4, GRID2, PDE4D or GPX3/TNIP1 nucleic acid may also be cloned into an expression vector in an antisense orientation. Regulatory sequences (e.g., viral promoters and/or enhancers) operatively linked to a CETP, PROL4, GRID2, PDE4D or GPX3/TNIP1 nucleic acid cloned in the antisense orientation can be chosen for directing constitutive, tissue specific or cell type specific expression of antisense RNA in a variety of cell types. Antisense expression vectors can be in the form of a recombinant plasmid, phagemid or attenuated virus. For a discussion of the regulation of gene expression using antisense genes see, e.g., Weintraub et al., Antisense RNA as a molecular tool for genetic analysis, Reviews—Trends in Genetics, Vol. 1(1) (1986).

[0071] Also provided herein are host cells that include a CETP, PROL4, GRID2, PDE4D or GPX3/TNIP1 nucleotide sequence within a recombinant expression vector or a fragment of such a nucleotide sequence which facilitate homologous recombination into a specific site of the host cell genome. The terms “host cell” and “recombinant host cell” are used interchangeably herein. Such terms refer not only to the particular subject cell but rather also to the progeny or potential progeny of such a cell. Because certain modifications may occur in succeeding generations due to either mutation or environmental influences, such progeny may not, in fact, be identical to the parent cell, but are still included within the scope of the term as used herein. A host cell can be any prokaryotic or eukaryotic cell. For example, a target polypeptide can be expressed in bacterial cells such as E. coli, insect cells, yeast or mammalian cells (such as Chinese hamster ovary cells (CHO) or COS cells). Other suitable host cells are known to those skilled in the art.

[0072] Vectors can be introduced into host cells via conventional transformation or transfection techniques. As used herein, the terms “transformation” and “transfection” are intended to refer to a variety of art-recognized techniques for introducing foreign nucleic acid (e.g., DNA) into a host cell, including calcium phosphate or calcium chloride co-precipitation, transduction/infection, DEAE-dextran-mediated transfection, lipofection, or electroporation.

[0073] A host cell provided herein can be used to produce (i.e., express) a target polypeptide or a substantially identical polypeptide thereof. Accordingly, further provided are methods for producing a target polypeptide using host cells described herein. In one embodiment, the method includes culturing host cells into which a recombinant expression vector encoding a target polypeptide has been introduced in a suitable medium such that a target polypeptide is produced. In another embodiment, the method further includes isolating a target polypeptide from the medium or the host cell.

[0074] Also provided are cells or purified preparations of cells which include a CETP, PROL4, GRID2, PDE4D or GPX3/TNIP1 transgene, or which otherwise misexpress target polypeptide. Cell preparations can consist of human or non-human cells, e.g., rodent cells, e.g., mouse or rat cells, rabbit cells, or pig cells. In preferred embodiments, the cell or cells include a CETP, PROL4, GRID2, PDE4D or GPX3/TNIP1 transgene (e.g., a heterologous form of a CETP, PROL4, GRID2, PDE4D or GPX3/TNIP1 gene, such as a human gene expressed in non-human cells). The transgene can be misexpressed, e.g., overexpressed or underexpressed. In other preferred embodiments, the cell or cells include a gene which misexpress an endogenous target polypeptide (e.g., expression of a gene is disrupted, also known as a knockout). Such cells can serve as a model for studying disorders which are related to mutated or mis-expressed alleles or for use in drug screening. Also provided are human cells (e.g., a hematopoietic stem cells) transformed with a CETP, PROL4, GRID2, PDE4D or GPX3/TNIP1 nucleic acid.

[0075] Also provided are cells or a purified preparation thereof (e.g., human cells) in which an endogenous CETP, PROL4, GRID2, PDE4D or GPX3/TNIP1 nucleic acid is under the control of a regulatory sequence that does not normally control the expression of the endogenous gene corresponding to a CETP, PROL4, GRID2, PDE4D or GPX3/TNIP1 nucleotide sequence. The expression characteristics of an endogenous gene within a cell (e.g., a cell line or microorganism) can be modified by inserting a heterologous DNA regulatory element into the genome of the cell such that the inserted regulatory element is operably linked to the corresponding endogenous gene. For example, an endogenous corresponding gene (e.g., a gene which is “transcriptionally silent,” not normally expressed, or expressed only at very low levels) may be activated by inserting a regulatory element which is capable of promoting the expression of a normally expressed gene product in that cell. Techniques such as targeted homologous recombinations, can be used to insert the heterologous DNA as described in, e.g., Chappel, U.S. Pat. No. 5,272,071; WO 91/06667, published on May 16, 1991.

[0076] Transyenic Animals

[0077] Non-human transgenic animals that express a heterologous target polypeptide (e.g., expressed from a CETP, PROL4, GRID2, PDE4D or GPX3/TNIP1 nucleic acid or substantially identical sequence thereof) can be generated. Such animals are useful for studying the function and/or activity of a target polypeptide and for identifying and/or evaluating modulators of the activity of CETP, PROL4, GRID2, PDE4D or GPX3/TNIP1 nucleic acids and encoded polypeptides. As used herein, a “transgenic animal” is a non-human animal such as a mammal (e.g., a non-human primate such as chimpanzee, baboon, or macaque; an ungulate such as an equine, bovine, or caprine; or a rodent such as a rat, a mouse, or an Israeli sand rat), a bird (e.g., a chicken or a turkey), an amphibian (e.g., a frog, salamander, or newt), or an insect (e.g., Drosophila melanogaster), in which one or more of the cells of the animal includes a transgene. A transgene is exogenous DNA or a rearrangement (e.g., a deletion of endogenous chromosomal DNA) that is often integrated into or occurs in the genome of cells in a transgenic animal. A transgene can direct expression of an encoded gene product in one or more cell types or tissues of the transgenic animal, and other transgenes can reduce expression (e.g., a knockout). Thus, a transgenic animal can be one in which an endogenous nucleic acid homologous to a CETP, PROL4, GRID2, PDE4D or GPX3/TNIP1 nucleic acid has been altered by homologous recombination between the endogenous gene and an exogenous DNA molecule introduced into a cell of the animal (e.g., an embryonic cell of the animal) prior to development of the animal.

[0078] Intronic sequences and polyadenylation signals can also be included in the transgene to increase expression efficiency of the transgene. One or more tissue-specific regulatory sequences can be operably linked to a CETP, PROL4, GRID2, PDE4D or GPX3/TNIP1 nucleotide sequence to direct expression of an encoded polypeptide to particular cells. A transgenic founder animal can be identified based upon the presence of a CETP, PROL4, GRID2, PDE4D or GPX3/TNIP1 nucleotide sequence in its genome and/or expression of encoded mRNA in tissues or cells of the animals. A transgenic founder animal can then be used to breed additional animals carrying the transgene. Moreover, transgenic animals carrying a CETP, PROL4, GRID2, PDE4D or GPX3/TNIP1 nucleotide sequence can further be bred to other transgenic animals carrying other transgenes.

[0079] Target polypeptides can be expressed in transgenic animals or plants by introducing, for example, a CETP, PROL4, GRID2, PDE4D or GPX3/TNIP1 nucleic acid into the genome of an animal that encodes the target polypeptide. In preferred embodiments the nucleic acid is placed under the control of a tissue specific promoter, e.g., a milk or egg specific promoter, and recovered from the milk or eggs produced by the animal. Also included is a population of cells from a transgenic animal.

[0080] Target Polypeptides

[0081] Also featured herein are isolated target polypeptides, which are encoded by a CETP, PROL4, GRID2, PDE4D or GPX3/TNIP1 nucleotide sequence (e.g., SEQ ID NO's:1-10) or a substantially identical nucleotide sequence thereof, such as the polypeptides having amino acid sequences in SEQ ID NO's:11-15. The term “polypeptide” as used herein includes proteins and peptides. An “isolated” or “purified” polypeptide or protein is substantially free of cellular material or other contaminating proteins from the cell or tissue source from which the protein is derived, or substantially free from chemical precursors or other chemicals when chemically synthesized. In one embodiment, the language “substantially free” means preparation of a target polypeptide having less than about 30%, 20%, 10% and more preferably 5% (by dry weight), of non-target polypeptide (also referred to herein as a “contaminating protein”), or of chemical precursors or non-target chemicals. When the target polypeptide or a biologically active portion thereof is recombinantly produced, it is also preferably substantially free of culture medium, specifically, where culture medium represents less than about 20%, sometimes less than about 10%, and often less than about 5% of the volume of the polypeptide preparation. Isolated or purified target polypeptide preparations are sometimes 0.01 milligrams or more or 0.1 milligrams or more, and often 1.0 milligrams or more and 10 milligrams or more in dry weight.

[0082] Further included herein are target polypeptide fragments. The polypeptide fragment may be a domain or part of a domain of a target polypeptide. In addition, the polypeptide fragment may be a full-length polypeptide or a mature polypeptide (i.e., the polypeptide minus the signal peptide). For example, a fragment sometimes is a CTEP mature protein that corresponds to amino acid positions 18493 of SEQ ID NO:11. The polypeptide fragment may have increased, decreased or unexpected biological activity. The polypeptide fragment is often 50 or fewer, 100 or fewer, or 200 or fewer amino acids in length, and is sometimes 300, 400, 500, 600, 700, or 900 or fewer amino acids in length.

[0083] Substantially identical target polypeptides may depart from the amino acid sequences of target polypeptides in different manners. For example, conservative amino acid modifications may be introduced at one or more positions in the amino acid sequences of target polypeptides. A “conservative amino acid substitution” is one in which the amino acid is replaced by another amino acid having a similar structure and/or chemical function. Families of amino acid residues having similar structures and functions are well known. These families include amino acids with basic side chains (e.g., lysine, arginine, histidine), acidic side chains (e.g., aspartic acid, glutamic acid), uncharged polar side chains (e.g., glycine, asparagine, glutamine, serine, threonine, tyrosine, cysteine), nonpolar side chains (e.g., alanine, valine, leucine, isoleucine, proline, phenylalanine, methionine, tryptophan), beta-branched side chains (e.g., threonine, valine, isoleucine) and aromatic side chains (e.g., tyrosine, phenylalanine, tryptophan, histidine). Also, essential and non-essential amino acids may be replaced. A “non-essential” amino acid is one that can be altered without abolishing or substantially altering the biological function of a target polypeptide, whereas altering an “essential” amino acid abolishes or substantially alters the biological function of a target polypeptide. Amino acids that are conserved among target polypeptides are typically essential amino acids.

[0084] Also, target polypeptides may exist as chimeric or fusion polypeptides. As used herein, a target “chimeric polypeptide” or target “fusion polypeptide” includes a target polypeptide linked to a non-target polypeptide. A “non-target polypeptide” refers to a polypeptide having an amino acid sequence corresponding to a polypeptide which is not substantially identical to the target polypeptide, which includes, for example, a polypeptide that is different from the target polypeptide and derived from the same or a different organism. The target polypeptide in the fusion polypeptide can correspond to an entire or nearly entire target polypeptide or a fragment thereof. The non-target polypeptide can be fused to the N-terminus or C-terminus of the target polypeptide.

[0085] Fusion polypeptides can include a moiety having high affinity for a ligand. For example, the fusion polypeptide can be a GST-target fusion polypeptide in which the target sequences are fused to the C-terminus of the GST sequences, or a polyhistidine-target fusion polypeptide in which the target polypeptide is fused at the N- or C-terminus to a string of histidine residues. Such fusion polypeptides can facilitate purification of recombinant target polypeptide. Expression vectors are commercially available that already encode a fusion moiety (e.g., a GST polypeptide), and a nucleotide sequence in SEQ ID NO's:1-10, or a substantially identical nucleotide sequence thereof, can be cloned into an expression vector such that the fusion moiety is linked in-frame to the target polypeptide. Further, the fusion polypeptide can be a target polypeptide containing a heterologous signal sequence at its N-terminus. In certain host cells (e.g., mammalian host cells), expression, secretion, cellular internalization, and cellular localization of a target polypeptide can be increased through use of a heterologous signal sequence. Fusion polypeptides can also include all or a part of a serum polypeptide (e.g., an IgG constant region or human serum albumin).

[0086] Target polypeptides can be incorporated into pharmaceutical compositions and administered to a subject in vivo. Administration of these target polypeptides can be used to affect the bioavailability of a substrate of the target polypeptide and may effectively increase target polypeptide biological activity in a cell. Target fusion polypeptides may be useful therapeutically for the treatment of disorders caused by, for example, (i) aberrant modification or mutation of a gene encoding a target polypeptide; (ii) mis-regulation of the gene encoding the target polypeptide; and (iii) aberrant post-translational modification of a target polypeptide. Also, target polypeptides can be used as immunogens to produce anti-target antibodies in a subject, to purify target polypeptide ligands or binding partners, and in screening assays to identify molecules which inhibit or enhance the interaction of a target polypeptide with a substrate.

[0087] In addition, polypeptides can be chemically synthesized using techniques known in the art (See, e.g., Creighton, 1983 Proteins. New York, N.Y.: W. H. Freeman and Company, and Hunkapiller et al., (1984) Nature July 12-18; 310(5973):105-11). For example, a relative short fragment can be synthesized by use of a peptide synthesizer. Furthermore, if desired, non-classical amino acids or chemical amino acid analogs can be introduced as a substitution or addition into the fragment sequence. Non-classical amino acids include, but are not limited to, to the D-isomers of the common amino acids, 2,4-diaminobutyric acid, a-amino isobutyric acid, 4-aminobutyric acid, Abu, 2-amino butyric acid, g-Abu, e-Ahx, 6-amino hexanoic acid, Aib, 2-amino isobutyric acid, 3-amino propionic acid, ornithine, norleucine, norvaline, hydroxyproline, sarcosine, citrulline, homocitrulline, cysteic acid, t-butylglycine, t-butylalanine, phenylglycine, cyclohexylalanine, b-alanine, fluoroamino acids, designer amino acids such as b-methyl amino acids, Ca-methyl amino acids, Na-methyl amino acids, and amino acid analogs in general. Furthermore, the amino acid can be D (dextrorotary) or L (levorotary).

[0088] Polypeptides and polypeptide fragments sometimes are differentially modified during or after translation, e.g., by glycosylation, acetylation, phosphorylation, amidation, derivatization by known protecting/blocking groups, proteolytic cleavage, linkage to an antibody molecule or other cellular ligand, etc. Any of numerous chemical modifications may be carried out by known techniques, including but not limited, to specific chemical cleavage by cyanogen bromide, trypsin, chymotrypsin, papain, V8 protease, NaBH4; acetylation, formylation, oxidation, reduction; metabolic synthesis in the presence of tunicamycin; and the like. Additional post-translational modifications include, for example, N-linked or O-linked carbohydrate chains, processing of N-terminal or C-terminal ends), attachment of chemical moieties to the amino acid backbone, chemical modifications of N-linked or O-linked carbohydrate chains, and addition or deletion of an N-terminal methionine residue as a result of prokaryotic host cell expression. The polypeptide fragments may also be modified with a detectable label, such as an enzymatic, fluorescent, isotopic or affinity label to allow for detection and isolation of the polypeptide.

[0089] Also provided are chemically modified derivatives of polypeptides that can provide additional advantages such as increased solubility, stability and circulating time of the polypeptide, or decreased immunogenicity (see e.g., U.S. Pat. No. 4,179,337. The chemical moieties for derivitization may be selected from water soluble polymers such as polyethylene glycol, ethylene glycol/propylene glycol copolymers, carboxymethylcellulose, dextran, polyvinyl alcohol and the like. The polypeptides may be modified at random positions within the molecule, or at predetermined positions within the molecule and may include one, two, three or more attached chemical moieties.

[0090] The polymer may be of any molecular weight, and may be branched or unbranched. For polyethylene glycol, the preferred molecular weight is between about 1 kDa and about 100 kDa (the term “about” indicating that in preparations of polyethylene glycol, some molecules will weigh more, some less, than the stated molecular weight) for ease in handling and manufacturing. Other sizes may be used, depending on the desired therapeutic profile (e.g., the duration of sustained release desired, the effects, if any on biological activity, the ease in handling, the degree or lack of antigenicity and other known effects of the polyethylene glycol to a therapeutic protein or analog).

[0091] The polymers should be attached to the polypeptide with consideration of effects on functional or antigenic domains of the polypeptide. There are a number of attachment methods available to those skilled in the art (e.g., EP 0 401 384 (coupling PEG to G-CSF) and Malik et al. (1992) Exp Hematol. September; 20(8):1028-35 (pegylation of GM-CSF using tresyl chloride)). For example, polyethylene glycol may be covalently bound through amino acid residues via a reactive group, such as a free amino or carboxyl group. Reactive groups are those to which an activated polyethylene glycol molecule may be bound. The amino acid residues having a free amino group may include lysine residues and the N-terminal amino acid residues; those having a free carboxyl group may include aspartic acid residues, glutamic acid residues and the C-terminal amino acid residue. Sulfhydryl groups may also be used as a reactive group for attaching the polyethylene glycol molecules. For therapeutic purposes, the attachment sometimes is at an amino group, such as attachment at the N-terminus or lysine group.

[0092] Proteins can be chemically modified at the N-terminus. Using polyethylene glycol as an illustration of such a composition, one may select from a variety of polyethylene glycol molecules (by molecular weight, branching, and the like), the proportion of polyethylene glycol molecules to protein (polypeptide) molecules in the reaction mix, the type of pegylation reaction to be performed, and the method of obtaining the selected N-terminally pegylated protein. The method of obtaining the N-terminally pegylated preparation (i.e., separating this moiety from other monopegylated moieties if necessary) may be by purification of the N-terminally pegylated material from a population of pegylated protein molecules. Selective proteins chemically modified at the N-terminus may be accomplished by reductive alkylation, which exploits differential reactivity of different types of primary amino groups (lysine versus the N-terminal) available for derivatization in a particular protein. Under the appropriate reaction conditions, substantially selective derivatization of the protein at the N-terminus with a carbonyl group containing polymer is achieved.

[0093] Substantially Identical Nucleic Acids and Polypeptides

[0094] Nucleotide sequences and polypeptide sequences that are substantially identical to a CETP, PROL4, GRID2, PDE4D or GPX3/TNIP1 nucleotide sequence and the target polypeptide sequences encoded by those nucleotide sequences, respectively, are included herein. The term “substantially identical” as used herein refers to two or more nucleic acids or polypeptides sharing one or more identical nucleotide sequences or polypeptide sequences, respectively. Included are nucleotide sequences or polypeptide sequences that are 55% or more, 60% or more, 65% or more, 70% or more, 75% or more, 80% or more, 85% or more, 90% or more, 95% or more (each often within a 1%, 2%, 3% or 4% variability) identical to a CETP, PROL4, GRID2, PDE4D or GPX3/TNIP1 nucleotide sequence or the encoded target polypeptide amino acid sequences. One test for determining whether two nucleic acids are substantially identical is to determine the percent of identical nucleotide sequences or polypeptide sequences shared between the nucleic acids or polypeptides.

[0095] Calculations of sequence identity are often performed as follows. Sequences are aligned for optimal comparison purposes (e.g., gaps can be introduced in one or both of a first and a second amino acid or nucleic acid sequence for optimal alignment and non-homologous sequences can be disregarded for comparison purposes). The length of a reference sequence aligned for comparison purposes is sometimes 30% or more, 40% or more, 50% or more, often 60% or more, and more often 70% or more, 80% or more, 90% or more, or 100% of the length of the reference sequence. The nucleotides or amino acids at corresponding nucleotide or polypeptide positions, respectively, are then compared among the two sequences. When a position in the first sequence is occupied by the same nucleotide or amino acid as the corresponding position in the second sequence, the nucleotides or amino acids are deemed to be identical at that position. The percent identity between the two sequences is a function of the number of identical positions shared by the sequences, taking into account the number of gaps, and the length of each gap, introduced for optimal alignment of the two sequences.

[0096] Comparison of sequences and determination of percent identity between two sequences can be accomplished using a mathematical algorithm. Percent identity between two amino acid or nucleotide sequences can be determined using the algorithm of Meyers & Miller, CABIOS 4: 11-17 (1989), which has been incorporated into the ALIGN program (version 2.0), using a PAM120 weight residue table, a gap length penalty of 12 and a gap penalty of 4. Also, percent identity between two amino acid sequences can be determined using the Needleman & Wunsch, J. Mol. Biol. 48: 444-453 (1970) algorithm which has been incorporated into the GAP program in the GCG software package (available at the http address www.gcg.com), using either a Blossum 62 matrix or a PAM250 matrix, and a gap weight of 16, 14, 12, 10, 8, 6, or 4 and a length weight of 1, 2, 3, 4, 5, or 6. Percent identity between two nucleotide sequences can be determined using the GAP program in the GCG software package (available at http address www.gcg.com), using a NWSgapdna.CMP matrix and a gap weight of 40, 50, 60, 70, or 80 and a length weight of 1, 2, 3, 4, 5, or 6. A set of parameters often used is a Blossum 62 scoring matrix with a gap open penalty of 12, a gap extend penalty of 4, and a frameshift gap penalty of 5.

[0097] Another manner for determining if two nucleic acids are substantially identical is to assess whether a polynucleotide homologous to one nucleic acid will hybridize to the other nucleic acid under stringent conditions. As use herein, the term “stringent conditions” refers to conditions for hybridization and washing. Stringent conditions are known to those skilled in the art and can be found in Current Protocols in Molecular Biology, John Wiley & Sons, N.Y., 6.3.1-6.3.6 (1989). Aqueous and non-aqueous methods are described in that reference and either can be used. An example of stringent hybridization conditions is hybridization in 6× sodium chloride/sodium citrate (SSC) at about 45° C., followed by one or more washes in 0.2×SSC, 0.1% SDS at 50° C. Another example of stringent hybridization conditions are hybridization in 6× sodium chloride/sodium citrate (SSC) at about 45° C., followed by one or more washes in 0.2×SSC, 0.1% SDS at 55° C. A further example of stringent hybridization conditions is hybridization in 6× sodium chloride/sodium citrate (SSC) at about 45° C., followed by one or more washes in 0.2×SSC, 0.1% SDS at 60° C. Often, stringent hybridization conditions are hybridization in 6× sodium chloride/sodium citrate (SSC) at about 45° C., followed by one or more washes in 0.2×SSC, 0.1% SDS at 65° C. More often, stringency conditions are 0.5M sodium phosphate, 7% SDS at 65° C., followed by one or more washes at 0.2×SSC, 1% SDS at 65° C.

[0098] An example of a substantially identical nucleotide sequence to a nucleotide sequence in SEQ ID NO's:1-10 is one that has a different nucleotide sequence but still encodes the same polypeptide sequence encoded by the nucleotide sequence in SEQ ID NO's:1-10. Another example is a nucleotide sequence that encodes a polypeptide having a polypeptide sequence that is more than 70% or more identical to, sometimes more than 75% or more, 80% or more, or 85% or more identical to, and often more than 90% or more and 95% or more identical to a polypeptide sequence encoded by a nucleotide sequence in SEQ ID NO's:1-10. As used herein, “SEQ ID NO's:1-10” typically refers to one or more sequences in SEQ ID NO: 1, 2, 3, 4, 5, 6, 7, 8, 9, and/or 10. Many of the embodiments described herein are applicable to (a) a nucleotide sequence of SEQ ID NO's:1-10; (b) a nucleotide sequence which encodes a polypeptide consisting of an amino acid sequence encoded by a nucleotide sequence of SEQ ID NO's:1-10; (c) a nucleotide sequence which encodes a polypeptide that is 90% or more identical to an amino acid sequence encoded by a nucleotide sequence of SEQ ID NO's:1-10, or a nucleotide sequence about 90% or more identical to a nucleotide sequence of SEQ ID NO's:1-10; (d) a fragment of a nucleotide sequence of (a), (b), or (c); and/or a nucleotide sequence complementary to the nucleotide sequences of (a), (b), (c) and/or (d), where nucleotide sequences of (b) and (c), fragments of (b) and (c) and nucleotide sequences complementary to (b) and (c) are examples of substantially identical nucleotide sequences. Examples of substantially identical nucleotide sequences include nucleotide sequences from subjects that differ by naturally occurring genetic variance, which sometimes is referred to as background genetic variance (e.g. nucleotide sequences differing by natural genetic variance sometimes are 90%, 91%, 92%, 93%, 94%, 95%, 96%, 97%, 98%, or 99% identical to one another).

[0099] Nucleotide sequences in SEQ ID NO's:1-10 and amino acid sequences of encoded polypeptides can be used as “query sequences” to perform a search against public databases to identify other family members or related sequences, for example. Such searches can be performed using the NBLAST and XBLAST programs (version 2.0) of Altschul et al., J. Mol. Biol. 215: 403-10 (1990). BLAST nucleotide searches can be performed with the NBLAST program, score=100, wordlength=12 to obtain nucleotide sequences homologous to nucleotide sequences in SEQ ID NO's:1-10. BLAST polypeptide searches can be performed with the XBLAST program, score=50, wordlength=3 to obtain amino acid sequences homologous to polypeptides encoded by the nucleotide sequences of SEQ ID NO's:1-10. To obtain gapped alignments for comparison purposes, Gapped BLAST can be utilized as described in Altschul et al., Nucleic Acids Res. 25(17): 3389-3402 (1997). When utilizing BLAST and Gapped BLAST programs, default parameters of the respective programs (e.g., XBLAST and NBLAST) can be used (see the http address www.ncbi.nlm.nih.gov).

[0100] A nucleic acid that is substantially identical to a nucleotide sequence in SEQ ID NO's:1-10 may include polymorphic sites at positions equivalent to those described herein when the sequences are aligned. For example, using the alignment procedures described herein, SNPs in a sequence substantially identical to a sequence in SEQ ID NO's:1-10 can be identified at nucleotide positions that match with or correspond to (i.e., align) nucleotides at SNP positions in each nucleotide sequence in SEQ ID NO's:1-10. Also, where a polymorphic variation results in an insertion or deletion, insertion or deletion of a nucleotide sequence from a reference sequence can change the relative positions of other polymorphic sites in the nucleotide sequence.

[0101] Substantially identical nucleotide and polypeptide sequences include those that are naturally occurring, such as allelic variants (same locus), splice variants, homologs (different locus), and orthologs (different organism) or can be non-naturally occurring. Non-naturally occurring variants can be generated by mutagenesis techniques, including those applied to polynucleotides, cells, or organisms. The variants can contain nucleotide substitutions, deletions, inversions and insertions. Variation can occur in either or both the coding and non-coding regions. The variations can produce both conservative and non-conservative amino acid substitutions (as compared in the encoded product). Orthologs, homologs, allelic variants, and splice variants can be identified using methods known in the art. These variants normally comprise a nucleotide sequence encoding a polypeptide that is 50% or more, about 55% or more, often about 70-75% or more or about 80-85% or more, and sometimes about 90-95% or more identical to the amino acid sequences of target polypeptides or a fragment thereof. Such nucleic acid molecules can readily be identified as being able to hybridize under stringent conditions to a nucleotide sequence in SEQ ID NO's:1-10 or a fragment of this sequence. Nucleic acid molecules corresponding to orthologs, homologs, and allelic variants of a nucleotide sequence in SEQ ID NO's:1-10 can further be identified by mapping the sequence to the same chromosome or locus as the nucleotide sequence in SEQ ID NO's:1-10.

[0102] Also, substantially identical nucleotide sequences may include codons that are altered with respect to the naturally occurring sequence for enhancing expression of a target polypeptide in a particular expression system. For example, the nucleic acid can be one in which one or more codons are altered, and often 10% or more or 20% or more of the codons are altered for optimized expression in bacteria (e.g., E. coli), yeast (e.g., S. cervesiae), human (e.g., 293 cells), insect, or rodent (e.g., hamster) cells.

[0103] Methods for Identifying Subjects at Risk of Osteoporosis and Risk of Osteoporosis in a Subject

[0104] Methods for prognosing and diagnosing low BMD and its related disorders (e.g., osteoporosis) are included herein. These methods include detecting the presence or absence of one or more polymorphic variations in a nucleotide sequence associated with low BMD, such as variants in or around the loci set forth herein, or a substantially identical sequence thereof, in a sample from a subject, where the presence of a polymorphic variant described herein is indicative of a risk of low BMD or one or more low BMD related disorders (e.g., osteoporosis). Determining a risk of osteoporosis refers to determining whether an individual is at an increased risk of osteoporosis (e.g., intermediate risk or higher risk).

[0105] Thus, featured herein is a method for identifying a subject who is at risk of osteoporosis, which comprises detecting low BMD-associated aberration in a nucleic acid sample from the subject. An embodiment is a method for detecting a risk of osteoporosis in a subject, which comprises detecting the presence or absence of a polymorphic variation associated with low BMD at a polymorphic site in a nucleotide sequence in a nucleic acid sample from a subject, where the nucleotide sequence comprises a polynucleotide sequence selected from the group consisting of: (a) a nucleotide sequence of SEQ ID NO's:1-10; (b) a nucleotide sequence which encodes a polypeptide consisting of an amino acid sequence encoded by a nucleotide sequence of SEQ ID NO's:1-10; (c) a nucleotide sequence which encodes a polypeptide that is 90% or more identical to an amino acid sequence encoded by a nucleotide sequence of SEQ ID NO's:1-10, or a nucleotide sequence about 90% or more identical to a nucleotide sequence of SEQ ID NO's:1-10; and (d) a fragment of a nucleotide sequence of (a), (b), or (c) comprising the polymorphic site; whereby the presence of the polymorphic variation is indicative of a predisposition to osteoporosis in the subject. In certain embodiments, polymorphic variants at the positions described herein are detected for determining a risk of osteoporosis, and polymorphic variants at positions in linkage disequilibrium with these positions are detected for determining a risk of osteoporosis. As used herein, “SEQ ID NO's:1-10” refers to individual sequences in SEQ ID NO: 1, 2, 3, 4, 5, 6, 7, 8, 9, 10, 11, and/or 12.

[0106] Results from prognostic tests may be combined with other test results to diagnose osteoporosis. For example, prognostic results may be gathered, an initial diagnostic test may be ordered based on a determined predisposition to low BMD, and the results of the analysis may be utilized to diagnose osteoporosis. Also osteoporosis diagnostic methods can be developed from studies used to generate prognostic/diagnostic methods in which populations are stratified into subpopulations having different progressions of osteoporosis. In another embodiment, prognostic results may be gathered; a patient's risk factors for developing osteoporosis analyzed (e.g., age, race, family history, age of menopause); and an initial diagnostic test may be ordered based on a determined predisposition to low BMD.

[0107] Risk factors believed to be associated with low BMD include personal history of fracture after age 50; current low bone mass; history of fracture in a 1° relative; being female; being thin and/or having a small frame; low body weight; advanced age; a family history of osteoporosis; estrogen deficiency, especially as a result of menopause which is early or surgically induced; abnormal absence of menstrual periods (amenorrhea); anorexia nervosa; low lifetime calcium intake; use of certain medications, such as corticosteroids and anticonvulsants; low testosterone levels in men; an inactive lifestyle; current cigarette smoking; excessive use of alcohol; being Caucasian or Asian, although African Americans and Hispanic Americans are at significant risk as well. (See National Osteoporosis Foundation; http://www.nof.org/osteoporosis/stats.htm). In an alternative embodiment, the results from predisposition analyses described herein may be combined with other test results indicative of osteoporosis, which were previously, concurrently, or subsequently gathered with respect to the predisposition testing. In these embodiments, the combination of the prognostic test results with other test results can be probative of osteoporosis, and the combination can be utilized as an osteoporosis diagnostic. The results of any test indicative of osteoporosis known in the art may be combined with the methods described herein. Examples of such tests are bone density tests that measure bone density in various sites of the body. Such methods include the measurement of the radiodensity of skeletal radiographs, quantitative computerized tomography, single energy photon absorptiometry, and dual-energy photon absorptiometry. Diagnostic techniques among those useful herein are described in W. A. Peck et al., Physician's Resource Manual on Osteoporosis (1987), published by the National Osteoporosis Foundation (incorporated by reference herein).

[0108] Risk of low BMD sometimes is expressed as a probability, such as an odds ratio, percentage, or risk factor. The risk sometimes is expressed as a relative risk with respect to a population average risk of low BMD, and sometimes is expressed as a relative risk with respect to the lowest risk group. Such relative risk assessments often are based upon penetrance values determined by statistical methods and are particularly useful to clinicians and insurance companies for assessing risk of osteoporosis (e.g., a clinician can target appropriate detection, prevention and therapeutic regimens to a patient after determining the patient's risk of osteoporosis, and an insurance company can fine tune actuarial tables based upon population genotype assessments of osteoporosis risk). Risk of osteoporosis sometimes is expressed as an odds ratio, which is the odds of a particular person having a genotype has or will develop osteoporosis with respect to another genotype group (e.g., the most disease protective genotype or population average). The risk often is based upon the presence or absence of one or more polymorphic variants described herein, and also may be based in part upon phenotypic traits of the individual being tested. In an embodiment, two or more polymorphic variations are detected in a CETP, PROL4, GRID2, PDE4D or GPX3/TNIP1 locus. In certain embodiments, 3 or more, or 4, 5, 6, 7, 8, 9, 10, 11, 12, 13, 14, 15, 16, 17, 18, 19 or 20 or more polymorphic variants are detected in the sample. Methods for calculating risk based upon patient data are well known (see, e.g., Agresti, Categorical Data Analysis, 2nd Ed. 2002. Wiley). Allelotyping and genotyping analyses may be carried out in populations other than those exemplified herein to enhance the predictive power of the prognostic method.

[0109] The nucleic acid sample typically is isolated from a biological sample obtained from a subject. For example, nucleic acid can be isolated from blood, saliva, sputum, urine, cell scrapings, and biopsy tissue. The nucleic acid sample can be isolated from a biological sample using standard techniques, such as the technique described in Example 2. As used herein, the term “subject” refers primarily to humans but also refers to other mammals such as dogs, cats, and ungulates (e.g., cattle, sheep, and swine). Subjects also include avians (e.g., chickens and turkeys), reptiles, and fish (e.g., salmon), as embodiments described herein can be adapted to nucleic acid samples isolated from any of these organisms. The nucleic acid sample may be isolated from the subject and then directly utilized in a method for determining the presence of a polymorphic variant, or alternatively, the sample may be isolated and then stored (e.g., frozen) for a period of time before being subjected to analysis.

[0110] The presence or absence of a polymorphic variant is determined using one or both chromosomal complements represented in the nucleic acid sample. Determining the presence or absence of a polymorphic variant in both chromosomal complements represented in a nucleic acid sample from a subject having a copy of each chromosome is useful for determining the zygosity of an individual for the polymorphic variant (i.e., whether the individual is homozygous or heterozygous for the polymorphic variant). Any oligonucleotide-based diagnostic may be utilized to determine whether a sample includes the presence or absence of a polymorphic variant in a sample. For example, primer extension methods, ligase sequence determination methods (e.g., U.S. Pat. Nos. 5,679,524 and 5,952,174, and WO 01/27326), mismatch sequence determination methods (e.g., U.S. Pat. Nos. 5,851,770; 5,958,692; 6,110,684; and 6,183,958), microarray sequence determination methods, restriction fragment length polymorphism (RFLP), single strand conformation polymorphism detection (SSCP) (e.g., U.S. Pat. Nos. 5,891,625 and 6,013,499), PCR-based assays (e.g., TAQMAN® PCR System (Applied Biosystems)), and nucleotide sequencing methods may be used.

[0111] Oligonucleotide extension methods typically involve providing a pair of oligonucleotide primers in a polymerase chain reaction (PCR) or in other nucleic acid amplification methods for the purpose of amplifying a region from the nucleic acid sample that comprises the polymorphic variation. One oligonucleotide primer is complementary to a region 3′ of the polymorphism and the other is complementary to a region 5′ of the polymorphism. A PCR primer pair may be used in methods disclosed in U.S. Pat. Nos. 4,683,195; 4,683,202, 4,965,188; 5,656,493; 5,998,143; 6,140,054; WO 01/27327; and WO 01/27329 for example. PCR primer pairs may also be used in any commercially available machines that perform PCR, such as any of the GENEAMP® Systems available from Applied Biosystems. Also, those of ordinary skill in the art will be able to design oligonucleotide primers based upon a CETP, PROL4, GRID2, PDE4D or GPX3/TNIP1 nucleotide sequence using knowledge available in the art.

[0112] Also provided is an extension oligonucleotide that hybridizes to the amplified fragment adjacent to the polymorphic variation. As used herein, the term “adjacent” refers to the 3′ end of the extension oligonucleotide being often 1 nucleotide from the 5′ end of the polymorphic site, and sometimes 2, 3, 4, 5, 6, 7, 8, 9, or 10 nucleotides from the 5′ end of the polymorphic site, in the nucleic acid when the extension oligonucleotide is hybridized to the nucleic acid. The extension oligonucleotide then is extended by one or more nucleotides, and the number and/or type of nucleotides that are added to the extension oligonucleotide determine whether the polymorphic variant is present. Oligonucleotide extension methods are disclosed, for example, in U.S. Pat. Nos. 4,656,127; 4,851,331; 5,679,524; 5,834,189; 5,876,934; 5,908,755; 5,912,118; 5,976,802; 5,981,186; 6,004,744; 6,013,431; 6,017,702; 6,046,005; 6,087,095; 6,210,891; and WO 01/20039. Oligonucleotide extension methods using mass spectrometry are described, for example, in U.S. Pat. Nos. 5,547,835; 5,605,798; 5,691,141; 5,849,542; 5,869,242; 5,928,906; 6,043,031; and 6,194,144, and a method often utilized is described herein in Example 2.

[0113] A microarray can be utilized for determining whether a polymorphic variant is present or absent in a nucleic acid sample. A microarray may include any oligonucleotides described herein, and methods for making and using oligonucleotide microarrays suitable for diagnostic use are disclosed in U.S. Pat. Nos. 5,492,806; 5,525,464; 5,589,330; 5,695,940; 5,849,483; 6,018,041; 6,045,996; 6,136,541; 6,142,681; 6,156,501; 6,197,506; 6,223,127; 6,225,625; 6,229,911; 6,239,273; WO 00/52625; WO 01/25485; and WO 01/29259. The microarray typically comprises a solid support and the oligonucleotides may be linked to this solid support by covalent bonds or by non-covalent interactions. The oligonucleotides may also be linked to the solid support directly or by a spacer molecule. A microarray may comprise one or more oligonucleotides complementary to a polymorphic site set forth herein.

[0114] A kit also may be utilized for determining whether a polymorphic variant is present or absent in a nucleic acid sample. A kit often comprises one or more pairs of oligonucleotide primers useful for amplifying a fragment of a nucleotide sequence of SEQ ID NO's:1-10 or a substantially identical sequence thereof, where the fragment includes a polymorphic site. The kit sometimes comprises a polymerizing agent, for example, a thermostable nucleic acid polymerase such as one disclosed in U.S. Pat. No. 4,889,818 or 6,077,664. Also, the kit often comprises an elongation oligonucleotide that hybridizes to a CETP, PROL4, GRID2, PDE4D or GPX3/TNIP1 nucleotide sequence in a nucleic acid sample adjacent to the polymorphic site. Where the kit includes an elongation oligonucleotide, it also often comprises chain elongating nucleotides, such as dATP, dTTP, dGTP, dCTP, and dITP, including analogs of dATP, dTTP, dGTP, dCTP and dITP, provided that such analogs are substrates for a thermostable nucleic acid polymerase and can be incorporated into a nucleic acid chain elongated from the extension oligonucleotide. Along with chain elongating nucleotides would be one or more chain terminating nucleotides such as ddATP, ddTTP, ddGTP, ddCTP, and the like. In an embodiment, the kit comprises one or more oligonucleotide primer pairs, a polymerizing agent, chain elongating nucleotides, at least one elongation oligonucleotide, and one or more chain terminating nucleotides. Kits optionally include buffers, vials, microtiter plates, and instructions for use.

[0115] An individual identified as being at risk of osteoporosis may be heterozygous or homozygous with respect to the allele associated with low BMD. A subject homozygous for an allele associated with low BMD is at a comparatively high risk of osteoporosis, a subject heterozygous for an allele associated with low BMD is at a comparatively intermediate risk of osteoporosis, and a subject homozygous for an allele associated with normal or high BMD levels (i.e., a decreased risk of low BMD) is at a comparatively low risk of osteoporosis. A genotype may be assessed for a complementary strand, such that the complementary nucleotide at a particular position is detected.

[0116] Also featured are methods for determining risk of osteoporosis and/or identifying a subject at risk of osteoporosis by contacting a polypeptide or protein encoded by a CETP, PROL4, GRID2, PDE4D or GPX3/TNIP1 nucleotide sequence from a subject with an antibody that specifically binds to an epitope associated with increased risk of osteoporosis in the polypeptide. In an embodiment, the antibody specifically binds to an epitope comprising an arginine at position 120 in a PROL4 polypeptide.

[0117] Applications of Prognostic and Diagnostic Results to Pharmacogenomic Methods

[0118] Pharmacogenomics is a discipline that involves tailoring a treatment for a subject according to the subject's genotype as a particular treatment regimen may exert a differential effect depending upon the subject's genotype. For example, based upon the outcome of a prognostic test described herein, a clinician or physician may target pertinent information and preventative or therapeutic treatments to a subject who would be benefited by the information or treatment and avoid directing such information and treatments to a subject who would not be benefited (e.g., the treatment has no therapeutic effect and/or the subject experiences adverse side effects).

[0119] The following is an example of a pharmacogenomic embodiment. A particular treatment regimen can exert a differential effect depending upon the subject's genotype. Where a candidate therapeutic exhibits a significant interaction with a major allele and a comparatively weak interaction with a minor allele (e.g., an order of magnitude or greater difference in the interaction), such a therapeutic typically would not be administered to a subject genotyped as being homozygous for the minor allele, and sometimes not administered to a subject genotyped as being heterozygous for the minor allele. In another example, where a candidate therapeutic is not significantly toxic when administered to subjects who are homozygous for a major allele but is comparatively toxic when administered to subjects heterozygous or homozygous for a minor allele, the candidate therapeutic is not typically administered to subjects who are genotyped as being heterozygous or homozygous with respect to the minor allele.

[0120] The methods described herein are applicable to pharmacogenomic methods for preventing, alleviating or treating low BMD conditions such as osteoporosis. For example, a nucleic acid sample from an individual may be subjected to a prognostic test described herein. Where one or more polymorphic variations associated with low BMD are identified in a subject, information for preventing or treating osteoporosis and/or one or more osteoporosis treatment regimens then may be prescribed to that subject.

[0121] In certain embodiments, a treatment or preventative regimen is specifically prescribed and/or administered to individuals who will most benefit from it based upon their risk of developing osteoporosis assessed by the methods described herein. Thus, provided are methods for identifying a subject predisposed to osteoporosis and then prescribing a therapeutic or preventative regimen to individuals identified as having a predisposition. Thus, certain embodiments are directed to a method for increasing BMD levels or otherwise treating osteoporosis in a subject, which comprises: detecting the presence or absence of a polymorphic variant associated with low BMD in a nucleotide sequence in a nucleic acid sample from a subject, where the nucleotide sequence comprises a polynucleotide sequence selected from the group consisting of: (a) a nucleotide sequence of SEQ ID NO's:1-10; (b) a nucleotide sequence which encodes a polypeptide consisting of an amino acid sequence encoded by a nucleotide sequence of SEQ ID NO's:1-10; (c) a nucleotide sequence which encodes a polypeptide that is 90% or more identical to an amino acid sequence encoded by a nucleotide sequence of SEQ ID NO's:1-10, or a nucleotide sequence about 90% or more identical to a nucleotide sequence of SEQ ID NO's:1-10; and (d) a fragment of a polynucleotide sequence of (a), (b), or (c); and prescribing or administering a treatment regimen to a subject from whom the sample originated where the presence of a polymorphic variation associated with low BMD is detected in the nucleotide sequence. In these methods, predisposition results may be utilized in combination with other test results to diagnose low BMD associated conditions, such as osteoporosis.

[0122] Certain preventative treatments often are prescribed to subjects having a predisposition to osteoporosis and where the subject is diagnosed with low BMD or is diagnosed as having symptoms indicative of early stage osteoporosis. Established diagnostic techniques use x-ray and ultrasonography to measure skeletal parameters of bone size, volume and mineral density to predict fracture risk and to assess response to therapy. Such measurements give a “static” value which can be compared to normal values to aid diagnosis of low bone mass and fracture risk (Schott, Cornier et al. 1998). The World Health Organization defines osteoporosis as a bone mineral density level more than 2.5 standard deviations below the young normal mean. The various techniques used to measure bone mineral density include, a) Dual energy X-ray absorptiometry (DXA)—used to measure bone mass at the lumbar spine and hip, but it can also be applied to measuring total skeletal bone mass, soft-tissue composition and other regional bone measurements. DXA is considered the “gold standard” for BMD measurement; b) high-resolution quantitative computed tomography QCT)—highly sensitive, accurate and specific spinal measurements. This technique is more costly, not widely available and involves higher radiation doses than other techniques; c) single-energy x-ray absorptiometry (SXA)—provides accurate radius BMD measurements; d) quantitative ultrasound QUS)—new and promising technique which may have applications in both BMD measurement and assessment or architectural deterioration of bone tissue. Recent studies suggest QUS of calcaneus bone predicts hip fracture as well as DXA (Hans, Dargent-Molina et al. 1996).

[0123] An alternative method to predict fracture independently of bone mass is to measure bone turnover. High turnover (bone resorption and formation) is associated with rapid bone loss and is likely to contribute to micro-architectural deterioration (Ross and Knowlton 1998). This is a “dynamic” measurement which is assessed with biochemical markers in urine or serum and can be used effectively in therapy monitoring in preference to BNO measurements. When used in combination with bone mass assessment, biomarkers can provide more accurate fracture predictions over bone mass measurement alone. Osteoporosis-related biomarkers for bone resorption include deoxypyridinoline crosslinks, and osteoporosis-related biomarkers for bone formation include bone alkaline phosphatase and osteocalcin. Some of these biomarkers have been developed for use in diagnostic kits. The current challenge is to reduce the variability of the measurements and improve their reliability and applicability.

[0124] The treatment sometimes is preventative (e.g., is prescribed or administered to reduce the probability that a low BMD associated condition arises or progresses), sometimes is therapeutic, and sometimes delays, alleviates or halts the progression of a low BMD associated condition. Any known preventative or therapeutic treatment for alleviating or preventing the occurrence of a low BMD associated disorder is prescribed and/or administered. Preventative treatment for osteoporosis is most effective at the time when bone loss is increasing and before the bones have become fragile and prone to fracturing. Strategies for the prevention of this disease include development of bone density in early adulthood (i.e., building strong bones during childhood and adolescence), and minimization of bone loss in later life. Changes in lifestyle, nutrition and hormonal factors have been shown to affect bone loss. Specifically, a balanced diet rich in calcium and vitamin D, weight-bearing exercise, a healthy lifestyle with no smoking or excessive alcohol intake, and bone density testing and medication when appropriate are known to help reduce the risk of osteoporosis.

[0125] As therapeutic approaches for low BMD continue to evolve and improve, the goal of treatments for low BMD related disorders is to intervene even before clinical signs (e.g., impaired glucose tolerance, or IGT) first manifest. Thus, genetic markers associated with susceptibility to low BMD prove useful for early diagnosis, prevention and treatment of low BMD.

[0126] As osteoporosis preventative and treatment information can be specifically targeted to subjects in need thereof (e.g., those at risk of low BMD or those that have early stages of osteoporosis), provided herein is a method for preventing or reducing the risk of developing osteoporosis in a subject, which comprises: (a) detecting the presence or absence of a polymorphic variation associated with low BMD at a polymorphic site in a nucleotide sequence in a nucleic acid sample from a subject; (b) identifying a subject with a predisposition to osteoporosis, whereby the presence of the polymorphic variation is indicative of a predisposition to osteoporosis in the subject; and (c) if such a predisposition is identified, providing the subject with information about methods or products to prevent osteoporosis or to delay the onset of osteoporosis. Also provided is a method of targeting information or advertising to a subpopulation of a human population based on the subpopulation being genetically predisposed to a disease or condition, which comprises: (a) detecting the presence or absence of a polymorphic variation associated with low BMD at a polymorphic site in a nucleotide sequence in a nucleic acid sample from a subject; (b) identifying the subpopulation of subjects in which the polymorphic variation is associated with low BMD; and (c) providing information only to the subpopulation of subjects about a particular product which may be obtained and consumed or applied by the subject to help prevent or delay onset of the disease or condition.

[0127] Pharmacogenomics methods also may be used to analyze and predict a response to a osteoporosis treatment or a drug. For example, if pharmacogenomics analysis indicates a likelihood that an individual will respond positively to a osteoporosis treatment with a particular drug, the drug may be administered to the individual. Conversely, if the analysis indicates that an individual is likely to respond negatively to treatment with a particular drug, an alternative course of treatment may be prescribed. A negative response may be defined as either the absence of an efficacious response or the presence of toxic side effects. The response to a therapeutic treatment can be predicted in a background study in which subjects in any of the following populations are genotyped: a population that responds favorably to a treatment regimen, a population that does not respond significantly to a treatment regimen, and a population that responds adversely to a treatment regiment (e.g., exhibits one or more side effects). These populations are provided as examples and other populations and subpopulations may be analyzed. Based upon the results of these analyses, a subject is genotyped to predict whether he or she will respond favorably to a treatment regimen, not respond significantly to a treatment regimen, or respond adversely to a treatment regimen.

[0128] The tests described herein also are applicable to clinical drug trials. One or more polymorphic variants indicative of response to an agent for treating osteoporosis or to side effects to an agent for treating osteoporosis may be identified using the methods described herein. Thereafter, potential participants in clinical trials of such an agent may be screened to identify those individuals most likely to respond favorably to the drug and exclude those likely to experience side effects. In that way, the effectiveness of drug treatment may be measured in individuals who respond positively to the drug, without lowering the measurement as a result of the inclusion of individuals who are unlikely to respond positively in the study and without risking undesirable safety problems.

[0129] Thus, another embodiment is a method of selecting an individual for inclusion in a clinical trial of a treatment or drug comprising the steps of: (a) obtaining a nucleic acid sample from an individual; (b) determining the identity of a polymorphic variation which is associated with a positive response to the treatment or the drug, or at least one polymorphic variation which is associated with a negative response to the treatment or the drug in the nucleic acid sample, and (c) including the individual in the clinical trial if the nucleic acid sample contains said polymorphic variation associated with a positive response to the treatment or the drug or if the nucleic acid sample lacks said polymorphic variation associated with a negative response to the treatment or the drug. In addition, the methods described herein for selecting an individual for inclusion in a clinical trial of a treatment or drug encompass methods with any further limitation described in this disclosure, or those following, specified alone or in any combination. The polymorphic variation may be in a sequence selected individually or in any combination from the group consisting of (i) a nucleotide sequence of SEQ ID NO's:1-10; (ii) a nucleotide sequence which encodes a polypeptide consisting of an amino acid sequence encoded by a nucleotide sequence of SEQ ID NO's:1-10; (iii) a nucleotide sequence which encodes a polypeptide that is 90% or more identical to an amino acid sequence encoded by a nucleotide sequence of SEQ ID NO's:1-10, or a nucleotide sequence about 90% or more identical to a nucleotide sequence of SEQ ID NO's:1-10; and (iv) a fragment of a polynucleotide sequence of (i), (ii), or (iii) comprising the polymorphic site. The including step (c) optionally comprises administering the drug or the treatment to the individual if the nucleic acid sample contains the polymorphic variation associated with a positive response to the treatment or the drug and the nucleic acid sample lacks said biallelic marker associated with a negative response to the treatment or the drug.

[0130] Also provided herein is a method of partnering between a diagnostic/prognostic testing provider and a provider of a consumable product, which comprises: (a) the diagnostic/prognostic testing provider detects the presence or absence of a polymorphic variation associated with low BMD at a polymorphic site in a nucleotide sequence in a nucleic acid sample from a subject; (b) the diagnostic/prognostic testing provider identifies the subpopulation of subjects in which the polymorphic variation is associated with low BMD; (c) the diagnostic/prognostic testing provider forwards information to the subpopulation of subjects about a particular product which may be obtained and consumed or applied by the subject to help prevent or delay onset of the disease or condition; and (d) the provider of a consumable product forwards to the diagnostic test provider a fee every time the diagnostic/prognostic test provider forwards information to the subject as set forth in step (c) above.

[0131] Compositions Comprising Osteoporosis-Directed Molecules

[0132] Featured herein is a composition comprising a cell from a subject having low BMD or at risk of osteoporosis and one or more molecules specifically directed and targeted to a nucleic acid comprising a CETP, PROL4, GRID2, PDE4D or GPX3/TNIP1 nucleotide sequence or amino acid sequence. Such directed molecules include, but are not limited to, a compound that binds to a CETP, PROL4, GRID2, PDE4D or GPX3/TNIP1 nucleotide sequence or amino acid sequence referenced herein; a nucleic acid that hybridizes to a CETP, PROL4, GRID2, PDE4D or GPX3/TNIP1 nucleic acid under conditions of high stringency; a RNAi or siRNA molecule having a strand complementary to a CETP, PROL4, GRID2, PDE4D or GPX3/TNIP1 nucleotide sequence; an antisense nucleic acid complementary to an RNA encoded by a CETP, PROL4, GRID2, PDE4D or GPX3/TNIP1 nucleotide sequence; a ribozyme that hybridizes to a CETP, PROL4, GRID2, PDE4D or GPX3/TNIP1 nucleotide sequence; a nucleic acid aptamer that specifically binds a polypeptide encoded by CETP, PROL4, GRID2, PDE4D or GPX3/TNIP1 nucleotide sequence; and an antibody that specifically binds to a polypeptide encoded by CETP, PROL4, GRID2, PDE4D or GPX3/TNIP1 nucleotide sequence or binds to a nucleic acid having such a nucleotide sequence. In specific embodiments, the osteoporosis directed molecule interacts with a nucleic acid or polypeptide variant associated with osteoporosis, such as variants referenced herein. In other embodiments, the osteoporosis directed molecule interacts with a polypeptide involved in a signal pathway of a polypeptide encoded by a CETP, PROL4, GRID2, PDE4D or GPX3/TNIP1 nucleotide sequence, or a nucleic acid comprising such a nucleotide sequence.

[0133] Compositions sometimes include an adjuvant known to stimulate an immune response, and in certain embodiments, an adjuvant that stimulates a T-cell lymphocyte response. Adjuvants are known, including but not limited to an aluminum adjuvant (e.g., aluminum hydroxide); a cytokine adjuvant or adjuvant that stimulates a cytokine response (e.g., interleukin (IL)-12 and/or γ-interferon cytokines); a Freund-type mineral oil adjuvant emulsion (e.g., Freund's complete or incomplete adjuvant); a synthetic lipoid compound; a copolymer adjuvant (e.g., TitreMax); a saponin; Quil A; a liposome; an oil-in-water emulsion (e.g., an emulsion stabilized by Tween 80 and pluronic polyoxyethlene/polyoxypropylene block copolymer (Syntex Adjuvant Formulation); TitreMax; detoxified endotoxin (MPL) and mycobacterial cell wall components (TDW, CWS) in 2% squalene (Ribi Adjuvant System)); a muramyl dipeptide; an immune-stimulating complex (ISCOM, e.g., an Ag-modified saponin/cholesterol micelle that forms stable cage-like structure); an aqueous phase adjuvant that does not have a depot effect (e.g., Gerbu adjuvant); a carbohydrate polymer (e.g., AdjuPrime); L-tyrosine; a manide-oleate compound (e.g., Montanide); an ethylene-vinyl acetate copolymer (e.g., Elvax 40W1,2); or lipid A, for example. Such compositions are useful for generating an immune response against a osteoporosis directed molecule (e.g., an HLA-binding subsequence within a polypeptide encoded by a CETP, PROL4, GRID2, PDE4D or GPX3/TNIP1 nucleotide sequence). In such methods, a peptide having an amino acid subsequence of a polypeptide encoded by a CETP, PROL4, GRID2, PDE4D or GPX3/TNIP1 nucleotide sequence is delivered to a subject, where the subsequence binds to an HLA molecule and induces a CTL lymphocyte response. The peptide sometimes is delivered to the subject as an isolated peptide or as a minigene in a plasmid that encodes the peptide. Methods for identifying HLA-binding subsequences in such polypeptides are known (see e.g., publication WO02/20616 and PCT application US98/01373 for methods of identifying such sequences).

[0134] The cell may be in a group of cells cultured in vitro or in a tissue maintained in vitro or present in an animal in vivo (e.g., a rat, mouse, ape or human). In certain embodiments, a composition comprises a component from a cell such as a nucleic acid molecule (e.g., genomic DNA), a protein mixture or isolated protein, for example. The aforementioned compositions have utility in diagnostic, prognostic and pharmacogenomic methods described previously and in osteoporosis therapeutics described hereafter. Certain osteoporosis directed molecules are described in greater detail below.

[0135] Compounds

[0136] Compounds can be obtained using any of the numerous approaches in combinatorial library methods known in the art, including: biological libraries; peptoid libraries (libraries of molecules having the functionalities of peptides, but with a novel, non-peptide backbone which are resistant to enzymatic degradation but which nevertheless remain bioactive (see, e.g., Zuckermann et al., J. Med. Chem. 37: 2678-85 (1994)); spatially addressable parallel solid phase or solution phase libraries; synthetic library methods requiring deconvolution; “one-bead one-compound” library methods; and synthetic library methods using affinity chromatography selection. Biological library and peptoid library approaches are typically limited to peptide libraries, while the other approaches are applicable to peptide, non-peptide oligomer or small molecule libraries of compounds (Lam, Anticancer Drug Des. 12: 145, (1997)). Examples of methods for synthesizing molecular libraries are described, for example, in DeWitt et al., Proc. Natl. Acad. Sci. U.S.A. 90: 6909 (1993); Erb et al., Proc. Natl. Acad. Sci. USA 91: 11422 (1994); Zuckermann et al., J. Med. Chem. 37: 2678 (1994); Cho et al., Science 261: 1303 (1993); Carrell et al., Angew. Chem. Int. Ed. Engl. 33: 2059 (1994); Carell et al., Angew. Chem. Int. Ed. Engl. 33: 2061 (1994); and in Gallop et al., J. Med. Chem. 37: 1233 (1994).

[0137] Libraries of compounds may be presented in solution (e.g., Houghten, Biotechniques 13: 412-421 (1992)), or on beads (Lam, Nature 354: 82-84 (1991)), chips (Fodor, Nature 364: 555-556 (1993)), bacteria or spores (Ladner, U.S. Pat. No. 5,223,409), plasmids (Cull et al., Proc. Natl. Acad. Sci. USA 89: 1865-1869 (1992)) or on phage (Scott and Smith, Science 249: 386-390 (1990); Devlin, Science 249: 404-406 (1990); Cwirla et al., Proc. Natl. Acad. Sci. 87: 6378-6382 (1990); Felici, J. Mol. Biol. 222: 301-310 (1991); Ladner supra.).

[0138] A compound sometimes alters expression and sometimes alters activity of a polypeptide target and may be a small molecule. Small molecules include, but are not limited to, peptides, peptidomimetics (e.g., peptoids), amino acids, amino acid analogs, polynucleotides, polynucleotide analogs, nucleotides, nucleotide analogs, organic or inorganic compounds (i.e., including heteroorganic and organometallic compounds) having a molecular weight less than about 10,000 grams per mole, organic or inorganic compounds having a molecular weight less than about 5,000 grams per mole, organic or inorganic compounds having a molecular weight less than about 1,000 grams per mole, organic or inorganic compounds having a molecular weight less than about 500 grams per mole, and salts, esters, and other pharmaceutically acceptable forms of such compounds.

[0139] Antisense Nucleic Acid Molecules, Ribozymes, RNAi, siRNA and Modified Nucleic Acid Molecules

[0140] An “antisense” nucleic acid refers to a nucleotide sequence complementary to a “sense” nucleic acid encoding a polypeptide, e.g., complementary to the coding strand of a double-stranded cDNA molecule or complementary to an mRNA sequence. The antisense nucleic acid can be complementary to an entire coding strand (e.g., SEQ ID NO: 7-13), or to a portion thereof or a substantially identical sequence thereof. In another embodiment, the antisense nucleic acid molecule is antisense to a “noncoding region” of the coding strand of a nucleotide sequence (e.g., 5′ and 3′ untranslated regions in SEQ ID NO's:1-5).

[0141] An antisense nucleic acid can be designed such that it is complementary to the entire coding region of an mRNA encoded by a nucleotide sequence (e.g., SEQ ID NO's:1-10), and often the antisense nucleic acid is an oligonucleotide antisense to only a portion of a coding or noncoding region of the mRNA. For example, the antisense oligonucleotide can be complementary to the region surrounding the translation start site of the mRNA, e.g., between the −10 and +10 regions of the target gene nucleotide sequence of interest. An antisense oligonucleotide can be, for example, about 7, 10, 15, 20, 25, 30, 35, 40, 45, 50, 55, 60, 65, 70, 75, 80, or more nucleotides in length. The antisense nucleic acids, which include the ribozymes described hereafter, can be designed to target a CETP, PROL4, GRID2, PDE4D or GPX3/TNIP1 nucleotide sequence, often a variant associated with low BMD, or a substantially identical sequence thereof. Among the variants, minor alleles and major alleles can be targeted, and those associated with a higher risk of osteoporosis are often designed, tested, and administered to subjects.

[0142] An antisense nucleic acid can be constructed using chemical synthesis and enzymatic ligation reactions using standard procedures. For example, an antisense nucleic acid (e.g., an antisense oligonucleotide) can be chemically synthesized using naturally occurring nucleotides or variously modified nucleotides designed to increase the biological stability of the molecules or to increase the physical stability of the duplex formed between the antisense and sense nucleic acids, e.g., phosphorothioate derivatives and acridine substituted nucleotides can be used. Antisense nucleic acid also can be produced biologically using an expression vector into which a nucleic acid has been subcloned in an antisense orientation (i.e., RNA transcribed from the inserted nucleic acid will be of an antisense orientation to a target nucleic acid of interest, described further in the following subsection).

[0143] When utilized as therapeutics, antisense nucleic acids typically are administered to a subject (e.g., by direct injection at a tissue site) or generated in situ such that they hybridize with or bind to cellular mRNA and/or genomic DNA encoding a polypeptide and thereby inhibit expression of the polypeptide, for example, by inhibiting transcription and/or translation. Alternatively, antisense nucleic acid molecules can be modified to target selected cells and then are administered systemically. For systemic administration, antisense molecules can be modified such that they specifically bind to receptors or antigens expressed on a selected cell surface, for example, by linking antisense nucleic acid molecules to peptides or antibodies which bind to cell surface receptors or antigens. Antisense nucleic acid molecules can also be delivered to cells using the vectors described herein. Sufficient intracellular concentrations of antisense molecules are achieved by incorporating a strong promoter, such as a pol II or pol III promoter, in the vector construct.

[0144] Antisense nucleic acid molecules sometimes are *-anomeric nucleic acid molecules. An *-anomeric nucleic acid molecule forms specific double-stranded hybrids with complementary RNA in which, contrary to the usual *-units, the strands run parallel to each other (Gaultier et al., Nucleic Acids. Res. 15: 6625-6641 (1987)). Antisense nucleic acid molecules can also comprise a 2′-o-methylribonucleotide (Inoue et al., Nucleic Acids Res. 15: 6131-6148 (1987)) or a chimeric RNA-DNA analogue (Inoue et al., FEBS Lett. 215: 327-330 (1987)). Antisense nucleic acids sometimes are composed of DNA or PNA or any other nucleic acid derivatives described previously.

[0145] In another embodiment, an antisense nucleic acid is a ribozyme. A ribozyme having specificity for a CETP, PROL4, GRID2, PDE4D or GPX3/TNIP1 nucleotide sequence can include one or more sequences complementary to such a nucleotide sequence, and a sequence having a known catalytic region responsible for mRNA cleavage (see e.g., U.S. Pat. No. 5,093,246 or Haselhoff and Gerlach, Nature 334: 585-591 (1988)). For example, a derivative of a Tetrahymena L-19 IVS RNA is sometimes utilized in which the nucleotide sequence of the active site is complementary to the nucleotide sequence to be cleaved in a mRNA (see e.g., Cech et al. U.S. Pat. No. 4,987,071; and Cech et al. U.S. Pat. No. 5,116,742). Also, target mRNA sequences can be used to select a catalytic RNA having a specific ribonuclease activity from a pool of RNA molecules (see e.g., Bartel & Szostak, Science 261: 1411-1418(1993)).

[0146] Osteoporosis directed molecules include in certain embodiments nucleic acids that can form triple helix structures with a CETP, PROL4, GRID2, PDE4D or GPX3/TNIP1 nucleotide sequence or a substantially identical sequence thereof, especially one that includes a regulatory region that controls expression of a polypeptide. Gene expression can be inhibited by targeting nucleotide sequences complementary to the regulatory region of a nucleotide sequence referenced herein or a substantially identical sequence (e.g., promoter and/or enhancers) to form triple helical structures that prevent transcription of a gene in target cells (see e.g., Helene, Anticancer Drug Des. 6(6): 569-84 (1991); Helene et al., Ann. N.Y. Acad. Sci. 660: 27-36 (1992); and Maher, Bioassays 14(12): 807-15 (1992). Potential sequences that can be targeted for triple helix formation can be increased by creating a so-called “switchback” nucleic acid molecule. Switchback molecules are synthesized in an alternating 5′-3′, 3′-5′ manner, such that they base pair with first one strand of a duplex and then the other, eliminating the necessity for a sizeable stretch of either purines or pyrimidines to be present on one strand of a duplex.

[0147] Osteoporosis directed molecules include RNAi and siRNA nucleic acids. Gene expression may be inhibited by the introduction of double-stranded RNA (dsRNA), which induces potent and specific gene silencing, a phenomenon called RNA interference or RNAi. See, e.g., Fire et al., U.S. Pat. No. 6,506,559; Tuschl et al. PCT International Publication No. WO 01/75164; Kay et al. PCT International Publication No. WO 03/010180A1; or Bosher J M, Labouesse, Nat Cell Biol 2000 February; 2(2):E31-6. This process has been improved by decreasing the size of the double-stranded RNA to 20-24 base pairs (to create small-interfering RNAs or siRNAs) that “switched off” genes in mammalian cells without initiating an acute phase response, i.e., a host defense mechanism that often results in cell death (see, e.g., Caplen et al. Proc Natl Acad Sci USA. 2001 Aug. 14; 98(17):9742-7 and Elbashir et al. Methods 2002 February; 26(2): 199-213). There is increasing evidence of post-transcriptional gene silencing by RNA interference (RNAi) for inhibiting targeted expression in mammalian cells at the mRNA level, in human cells. There is additional evidence of effective methods for inhibiting the proliferation and migration of tumor cells in human patients, and for inhibiting metastatic cancer development (see, e.g., U.S. Patent Application No. US2001000993183; Caplen et al. Proc Natl Acad Sci USA; and Abdeffahmani et al. Mol Cell Biol 2001 November 21(21):7256-67).

[0148] An “siRNA” or “RNAi” refers to a nucleic acid that forms a double stranded RNA and has the ability to reduce or inhibit expression of a gene or target gene when the siRNA is delivered to or expressed in the same cell as the gene or target gene. “siRNA” refers to short double-stranded RNA formed by the complementary strands. Complementary portions of the siRNA that hybridize to form the double stranded molecule often have substantial or complete identity to the target molecule sequence. In one embodiment, an siRNA refers to a nucleic acid that has substantial or complete identity to a target gene and forms a double stranded siRNA.

[0149] When designing the siRNA molecules, the targeted region often is selected from a given DNA sequence beginning 50 to 100 nucleotides downstream of the start codon. See, e.g., Elbashir et al., Methods 26:199-213 (2002). Initially, 5′ or 3′ UTRs and regions nearby the start codon were avoided assuming that UTR-binding proteins and/or translation initiation complexes may interfere with binding of the siRNP or RISC endonuclease complex. Sometimes regions of the target 23 nucleotides in length conforming to the sequence motif AA(N19)TT (N, an nucleotide), and regions with approximately 30% to 70% G/C-content (often about 50% G/C-content) often are selected. If no suitable sequences are found, the search often is extended using the motif NA(N21). The sequence of the sense siRNA sometimes corresponds to (N19) TT or N21 (position 3 to 23 of the 23-nt motif), respectively. In the latter case, the 3′ end of the sense siRNA often is converted to TT. The rationale for this sequence conversion is to generate a symmetric duplex with respect to the sequence composition of the sense and antisense 3′ overhangs. The antisense siRNA is synthesized as the complement to position 1 to 21 of the 23-nt motif. Because position 1 of the 23-nt motif is not recognized sequence-specifically by the antisense siRNA, the 3′-most nucleotide residue of the antisense siRNA can be chosen deliberately. However, the penultimate nucleotide of the antisense siRNA (complementary to position 2 of the 23-nt motif) often is complementary to the targeted sequence. For simplifying chemical synthesis, TT often is utilized. siRNAs corresponding to the target motif NAR(N17)YNN, where R is purine (A,G) and Y is pyrimidine (C,U), often are selected. Respective 21 nucleotide sense and antisense siRNAs often begin with a purine nucleotide and can also be expressed from pol III expression vectors without a change in targeting site. Expression of RNAs from pol III promoters often is efficient when the first transcribed nucleotide is a purine.

[0150] The sequence of the siRNA can correspond to the full length target gene, or a subsequence thereof. Often, the siRNA is about 15 to about 50 nucleotides in length (e.g., each complementary sequence of the double stranded siRNA is 15-50 nucleotides in length, and the double stranded siRNA is about 15-50 base pairs in length, sometimes about 20-30 nucleotides in length or about 20-25 nucleotides in length, e.g., 20, 21, 22, 23, 24, 25, 26, 27, 28, 29, or 30 nucleotides in length. The siRNA sometimes is about 21 nucleotides in length. Methods of using siRNA are well known in the art, and specific siRNA molecules may be purchased from a number of companies including Dharmacon Research, Inc. An siRNA molecule sometimes is of a different chemical composition as compared to native RNA that imparts increased stability in cells (e.g., decreased susceptibility to degradation), and sometimes includes one or more modifications in siSTABLE RNA described at the http address www.dharmacon.com.

[0151] Antisense, ribozyme, RNAi and siRNA nucleic acids can be altered to form modified nucleic acid molecules. The nucleic acids can be altered at base moieties, sugar moieties or phosphate backbone moieties to improve stability, hybridization, or solubility of the molecule. For example, the deoxyribose phosphate backbone of nucleic acid molecules can be modified to generate peptide nucleic acids (see Hyrup et al., Bioorganic & Medicinal Chemistry 4 (1): 5-23 (1996)). As used herein, the terms “peptide nucleic acid” or “PNA” refers to a nucleic acid mimic such as a DNA mimic, in which the deoxyribose phosphate backbone is replaced by a pseudopeptide backbone and only the four natural nucleobases are retained. The neutral backbone of a PNA can allow for specific hybridization to DNA and RNA under conditions of low ionic strength. Synthesis of PNA oligomers can be performed using standard solid phase peptide synthesis protocols as described, for example, in Hyrup et al., (1996) supra and Perry-O'Keefe et al., Proc. Natl. Acad. Sci. 93: 14670-675 (1996).

[0152] PNA nucleic acids can be used in prognostic, diagnostic, and therapeutic applications. For example, PNAs can be used as antisense or antigene agents for sequence-specific modulation of gene expression by, for example, inducing transcription or translation arrest or inhibiting replication. PNA nucleic acid molecules can also be used in the analysis of single base pair mutations in a gene, (e.g., by PNA-directed PCR clamping); as “artificial restriction enzymes” when used in combination with other enzymes, (e.g., S1 nucleases (Hyrup (1996) supra)); or as probes or primers for DNA sequencing or hybridization (Hyrup et al., (1996) supra; Perry-O'Keefe supra).

[0153] In other embodiments, oligonucleotides may include other appended groups such as peptides (e.g., for targeting host cell receptors in vivo), or agents facilitating transport across cell membranes (see e.g., Letsinger et al., Proc. Natl. Acad. Sci. USA 86: 6553-6556 (1989); Lemaitre et al., Proc. Natl. Acad. Sci. USA 84: 648-652 (1987); PCT Publication No. WO88/09810) or the blood-brain barrier (see, e.g., PCT Publication No. WO 89/10134). In addition, oligonucleotides can be modified with hybridization-triggered cleavage agents (See, e.g., Krol et al., Bio-Techniques 6: 958-976 (1988)) or intercalating agents. (See, e.g., Zon, Pharm. Res. 5: 539-549 (1988)). To this end, the oligonucleotide may be conjugated to another molecule, (e.g., a peptide, hybridization triggered cross-linking agent, transport agent, or hybridization-triggered cleavage agent).

[0154] Also included herein are molecular beacon oligonucleotide primer and probe molecules having one or more regions complementary to a CETP, PROL4, GRID2, PDE4D or GPX3/TNIP1 nucleotide sequence or a substantially identical sequence thereof, two complementary regions one having a fluorophore and one a quencher such that the molecular beacon is useful for quantifying the presence of the nucleic acid in a sample. Molecular beacon nucleic acids are described, for example, in Lizardi et al., U.S. Pat. No. 5,854,033; Nazarenko et al., U.S. Pat. No. 5,866,336, and Livak et al., U.S. Pat. No. 5,876,930.

[0155] Antibody

[0156] The term “antibody” as used herein refers to an immunoglobulin molecule or immunologically active portion thereof, i.e., an antigen-binding portion. Examples of immunologically active portions of immunoglobulin molecules include F(ab) and F(ab′)₂ fragments which can be generated by treating the antibody with an enzyme such as pepsin. An antibody sometimes is a polyclonal, monoclonal, recombinant (e.g., a chimeric or humanized), fully human, non-human (e.g., murine), or a single chain antibody. An antibody may have effector function and can fix complement, and is sometimes coupled to a toxin or imaging agent.

[0157] Antibodies

[0158] A full-length polypeptide or antigenic peptide fragment encoded by a nucleotide sequence referenced herein can be used as an immunogen or can be used to identify antibodies made with other immunogens, e.g., cells, membrane preparations, and the like. An antigenic peptide often includes at least 8 amino acid residues of the amino acid sequences encoded by a nucleotide sequence referenced herein, or substantially identical sequence thereof, and encompasses an epitope. Antigenic peptides sometimes include 10 or more amino acids, 15 or more amino acids, 20 or more amino acids, or 30 or more amino acids. Hydrophilic and hydrophobic fragments of polypeptides sometimes are used as immunogens.

[0159] Epitopes encompassed by the antigenic peptide are regions located on the surface of the polypeptide (e.g., hydrophilic regions) as well as regions with high antigenicity. For example, an Emini surface probability analysis of the human polypeptide sequence can be used to indicate the regions that have a particularly high probability of being localized to the surface of the polypeptide and are thus likely to constitute surface residues useful for targeting antibody production. The antibody may bind an epitope on any domain or region on polypeptides described herein.

[0160] Also, chimeric, humanized, and completely human antibodies are useful for applications which include repeated administration to subjects. Chimeric and humanized monoclonal antibodies, comprising both human and non-human portions, can be made using standard recombinant DNA techniques. Such chimeric and humanized monoclonal antibodies can be produced by recombinant DNA techniques known in the art, for example using methods described in Robinson et al International Application No. PCT/US86/02269; Akira, et al European Patent Application 184,187; Taniguchi, M., European Patent Application 171,496; Morrison et al European Patent Application 173,494; Neuberger et al PCT International Publication No. WO 86/01533; Cabilly et al U.S. Pat. No. 4,816,567; Cabilly et al European Patent Application 125,023; Better et al., Science 240: 1041-1043 (1988); Liu et al., Proc. Natl. Acad. Sci. USA 84: 3439-3443 (1987); Liu et al., J. Immunol. 139: 3521-3526 (1987); Sun et al., Proc. Natl. Acad. Sci. USA 84: 214-218 (1987); Nishimura et al., Canc. Res. 47: 999-1005 (1987); Wood et al., Nature 314: 446-449 (1985); and Shaw et al., J. Natl. Cancer Inst. 80: 1553-1559 (1988); Morrison, S. L., Science 229:1202-1207(1985); Oi et al., BioTechniques 4: 214(1986); Winter U.S. Pat. No. 5,225,539; Jones et al., Nature 321: 552-525 (1986); Verhoeyan et al., Science 239: 1534; and Beidler et al., J. Immunol. 141: 4053-4060 (1988).

[0161] Completely human antibodies are particularly desirable for therapeutic treatment of human patients. Such antibodies can be produced using transgenic mice that are incapable of expressing endogenous immunoglobulin heavy and light chains genes, but which can express human heavy and light chain genes. See, for example, Lonberg and Huszar, Int. Rev. Immunol. 13: 65-93 (1995); and U.S. Pat. Nos. 5,625,126; 5,633,425; 5,569,825; 5,661,016; and 5,545,806. In addition, companies such as Abgenix, Inc. (Fremont, Calif.) and Medarex, Inc. (Princeton, N.J.), can be engaged to provide human antibodies directed against a selected antigen using technology similar to that described above. Completely human antibodies that recognize a selected epitope also can be generated using a technique referred to as “guided selection.” In this approach a selected non-human monoclonal antibody (e.g., a murine antibody) is used to guide the selection of a completely human antibody recognizing the same epitope. This technology is described for example by Jespers et al., Bio/Technology 12: 899-903 (1994).

[0162] An antibody can be a single chain antibody. A single chain antibody (scFV) can be engineered (see, e.g., Colcher et al., Ann. N Y Acad. Sci. 880: 263-80 (1999); and Reiter, Clin. Cancer Res. 2: 245-52 (1996)). Single chain antibodies can be dimerized or multimerized to generate multivalent antibodies having specificities for different epitopes of the same target polypeptide.

[0163] Antibodies also may be selected or modified so that they exhibit reduced or no ability to bind an Fc receptor. For example, an antibody may be an isotype or subtype, fragment or other mutant, which does not support binding to an Fc receptor (e.g., it has a mutagenized or deleted Fc receptor binding region).

[0164] Also, an antibody (or fragment thereof) may be conjugated to a therapeutic moiety such as a cytotoxin, a therapeutic agent or a radioactive metal ion. A cytotoxin or cytotoxic agent includes any agent that is detrimental to cells. Examples include taxol, cytochalasin B, gramicidin D, ethidium bromide, emetine, mitomycin, etoposide, tenoposide, vincristine, vinblastine, colchicin, doxorubicin, daunorubicin, dihydroxy anthracin dione, mitoxantrone, mithramycin, actinomycin D, l dehydrotestosterone, glucocorticoids, procaine, tetracaine, lidocaine, propranolol, and puromycin and analogs or homologs thereof. Therapeutic agents include, but are not limited to, antimetabolites (e.g., methotrexate, 6-mercaptopurine, 6-thioguanine, cytarabine, 5-fluorouracil decarbazine), alkylating agents (e.g., mechlorethamine, thiotepa chlorambucil, melphalan, carmustine (BCNU) and lomustine (CCNU), cyclophosphamide, busulfan, dibromomannitol, streptozotocin, mitomycin C, and cis-dichlorodiamine platinum (II) (DDP) cisplatin), anthracyclines (e.g., daunorubicin (formerly daunomycin) and doxorubicin), antibiotics (e.g., dactinomycin (formerly actinomycin), bleomycin, mithramycin, and anthramycin (AMC)), and anti-mitotic agents (e.g., vincristine and vinblastine).

[0165] Antibody conjugates can be used for modifying a given biological response. For example, the drug moiety may be a protein or polypeptide possessing a desired biological activity. Such proteins may include, for example, a toxin such as abrin, ricin A, pseudomonas exotoxin, or diphtheria toxin; a polypeptide such as tumor necrosis factor, γ-interferon, α-interferon, nerve growth factor, platelet derived growth factor, tissue plasminogen activator; or, biological response modifiers such as, for example, lymphokines, interleukin-1 (“IL-1”), interleukin-2 (“IL-2”), interleukin-6 (“IL-6”), granulocyte macrophage colony stimulating factor (“GM-CSF”), granulocyte colony stimulating factor “G-CSF”), or other growth factors. Also, an antibody can be conjugated to a second antibody to form an antibody heteroconjugate as described by Segal in U.S. Pat. No. 4,676,980, for example.

[0166] An antibody (e.g., monoclonal antibody) can be used to isolate target polypeptides by standard techniques, such as affinity chromatography or immunoprecipitation. Moreover, an antibody can be used to detect a target polypeptide (e.g., in a cellular lysate or cell supernatant) in order to evaluate the abundance and pattern of expression of the polypeptide. Antibodies can be used diagnostically to monitor polypeptide levels in tissue as part of a clinical testing procedure, e.g., to determine the efficacy of a given treatment regimen. Detection can be facilitated by coupling (i.e., physically linking) the antibody to a detectable substance (i.e., antibody labeling). Examples of detectable substances include various enzymes, prosthetic groups, fluorescent materials, luminescent materials, bioluminescent materials, and radioactive materials. Examples of suitable enzymes include horseradish peroxidase, alkaline phosphatase, β-galactosidase, or acetylcholinesterase; examples of suitable prosthetic group complexes include streptavidin/biotin and avidin/biotin; examples of suitable fluorescent materials include umbelliferone, fluorescein, fluorescein isothiocyanate, rhodamine, dichlorotriazinylamine fluorescein, dansyl chloride or phycoerythrin; an example of a luminescent material includes luminol; examples of bioluminescent materials include luciferase, luciferin, and aequorin, and examples of suitable radioactive material include ¹²⁵I, ¹³¹I, ³⁵S or ³H. Also, an antibody can be utilized as a test molecule for determining whether it can treat osteoporosis, and as a therapeutic for administration to a subject for treating osteoporosis.

[0167] An antibody can be made by immunizing with a purified antigen, or a fragment thereof, e.g., a fragment described herein, a membrane associated antigen, tissues, e.g., crude tissue preparations, whole cells, preferably living cells, lysed cells, or cell fractions.

[0168] Included herein are antibodies which bind only a native polypeptide, only denatured or otherwise non-native polypeptide, or which bind both, as well as those having linear or conformational epitopes. Conformational epitopes sometimes can be identified by selecting antibodies that bind to native but not denatured polypeptide. Also featured are antibodies that specifically bind to a polypeptide variant associated with low BMD.

[0169] Methods for Identifying Candidate Therapeutics for Treating Osteoporosis

[0170] Current treatment for osteoporosis can help stop further bone loss and fractures, but there is still a clear need for specific anabolic agents that considerably increase bone formation in people who have already suffered substantial bone loss. There are no such drugs currently approved. Known osteoporosis treatments include bone-active phosphonates (See, e.g., U.S. Pat. No. 6,329,354), bisphosphonates, e.g., alendronate (Fosamax®) and risedronate (Actonel®); calcitonin (Niacalcin®); estrogen and hormone therapy, e.g., estrogens (Climara®, Estrace®, Estraderm®, Estratab®, Ogen®, Ortho-Est®, Vivelle®, Premarin®, and others) and estrogens and progestins (brand names, such as Activella™, FemHrt®, Premphase®, Prempro®, and others); parathyroid hormone, e.g., teriparatide {PTH 1-34} (Forteo®); as well as, estrogen and estrogen receptor modulators (SERMs), e.g., raloxifene HCl (Evista®), sodium fluoride and vitamin D metabolites. Any of the above therapeutics may be administered alone or in combination (e.g., bone-active phosphonates and estrogen and hormone therapy). Current therapeutic approaches were largely developed in the absence of defined molecular targets or even a solid understanding of disease pathogenesis. Therefore, provided are methods of identifying candidate therapeutics that target biochemical pathways related to the development of osteoporosis.

[0171] Thus, featured herein are methods for identifying a candidate therapeutic for treating osteoporosis. The methods comprise contacting a test molecule with a target molecule in a system. A “target molecule” as used herein refers to a CETP, PROL4, GRID2, PDE4D or GPX3/TNIP1 nucleic acid, a substantially identical nucleic acid thereof, or a fragment thereof, and an encoded polypeptide of the foregoing. The methods also comprise determining the presence or absence of an interaction between the test molecule and the target molecule, where the presence of an interaction between the test molecule and the nucleic acid or polypeptide identifies the test molecule as a candidate osteoporosis therapeutic. The interaction between the test molecule and the target molecule may be quantified.

[0172] Test molecules and candidate therapeutics include, but are not limited to, compounds, antisense nucleic acids, siRNA molecules, ribozymes, polypeptides or proteins encoded by a CETP, PROL4, GRID2, PDE4D or GPX3/TNIP1 nucleotide sequence, or a substantially identical sequence or fragment thereof, and immunotherapeutics (e.g., antibodies and HLA-presented polypeptide fragments). A test molecule or candidate therapeutic may act as a modulator of target molecule concentration or target molecule function in a system. A “modulator” may agonize (i.e., up-regulates) or antagonize (i.e., down-regulates) a target molecule concentration partially or completely in a system by affecting such cellular functions as DNA replication and/or DNA processing (e.g. DNA methylation or DNA repair), RNA transcription and/or RNA processing (e.g., removal of intronic sequences and/or translocation of spliced mRNA from the nucleus), polypeptide production (e.g., translation of the polypeptide from mRNA), and/or polypeptide post-translational modification (e.g., glycosylation, phosphorylation, and proteolysis of pro-polypeptides). A modulator may also agonize or antagonize a biological function of a target molecule partially or completely, where the function may include adopting a certain structural conformation, interacting with one or more binding partners, ligand binding, catalysis (e.g., phosphorylation, dephosphorylation, hydrolysis, methylation, and isomerization), and an effect upon a cellular event (e.g., effecting progression of osteoporosis). In certain embodiments, a candidate therapeutic increases BMD.

[0173] As used herein, the term “system” refers to a cell free in vitro environment and a cell-based environment such as a collection of cells, a tissue, an organ, or an organism. A system is “contacted” with a test molecule in a variety of manners, including adding molecules in solution and allowing them to interact with one another by diffusion, cell injection, and any administration routes in an animal. As used herein, the term “interaction” refers to an effect of a test molecule on test molecule, where the effect sometimes is binding between the test molecule and the target molecule, and sometimes is an observable change in cells, tissue, or organism.

[0174] There are many standard methods for detecting the presence or absence of interaction between a test molecule and a target molecule. For example, titrametric, acidimetric, radiometric, NMR, monolayer, polarographic, spectrophotometric, fluorescent, and ESR assays probative of a target molecule interaction may be utilized.

[0175] Test molecule/target molecule interactions can be detected and/or quantified using assays known in the art. For example, an interaction can be determined by labeling the test molecule and/or the target molecule, where the label is covalently or non-covalently attached to the test molecule or target molecule. The label is sometimes a radioactive molecule such as ¹²⁵I, ¹³¹I, ³⁵S or ³H, which can be detected by direct counting of radioemission or by scintillation counting. Also, enzymatic labels such as horseradish peroxidase, alkaline phosphatase, or luciferase may be utilized where the enzymatic label can be detected by determining conversion of an appropriate substrate to product. In addition, presence or absence of an interaction can be determined without labeling. For example, a microphysiometer (e.g., Cytosensor) is an analytical instrument that measures the rate at which a cell acidifies its environment using a light-addressable potentiometric sensor (LAPS). Changes in this acidification rate can be used as an indication of an interaction between a test molecule and target molecule (McConnell, H. M. et al., Science 257: 1906-1912 (1992)).

[0176] In cell-based systems, cells typically include a CETP, PROL4, GRID2, PDE4D or GPX3/TNIP1 nucleic acid, an encoded polypeptide, or substantially identical nucleic acid or polypeptide thereof, and are often of mammalian origin, although the cell can be of any origin. Whole cells, cell homogenates, and cell fractions (e.g., cell membrane fractions) can be subjected to analysis. Where interactions between a test molecule with a target polypeptide are monitored, soluble and/or membrane bound forms of the polypeptide may be utilized. Where membrane-bound forms of the polypeptide are used, it may be desirable to utilize a solubilizing agent. Examples of such solubilizing agents include non-ionic detergents such as n-octylglucoside, n-dodecylglucoside, n-dodecylmaltoside, octanoyl-N-methylglucamide, decanoyl-N-methylglucamide, Triton® X-100, Triton® X-114, Thesit®, Isotridecypoly(ethylene glycol ether)ₙ, 3-[(3-cholamidopropyl)dimethylamminio]-1-propane sulfonate (CHAPS), 3-[(3-cholamidopropyl)dimethylamminio]-2-hydroxy-1-propane sulfonate (CHAPSO), or N-dodecyl-N,N-dimethyl-3-ammonio-1-propane sulfonate.

[0177] An interaction between a test molecule and target molecule also can be detected by monitoring fluorescence energy transfer (FET) (see, e.g., Lakowicz et al., U.S. Pat. No. 5,631,169; Stavrianopoulos et al. U.S. Pat. No. 4,868,103). A fluorophore label on a first, “donor” molecule is selected such that its emitted fluorescent energy will be absorbed by a fluorescent label on a second, “acceptor” molecule, which in turn is able to fluoresce due to the absorbed energy. Alternately, the “donor” polypeptide molecule may simply utilize the natural fluorescent energy of tryptophan residues. Labels are chosen that emit different wavelengths of light, such that the “acceptor” molecule label may be differentiated from that of the “donor”. Since the efficiency of energy transfer between the labels is related to the distance separating the molecules, the spatial relationship between the molecules can be assessed. In a situation in which binding occurs between the molecules, the fluorescent emission of the “acceptor” molecule label in the assay should be maximal. An FET binding event can be conveniently measured through standard fluorometric detection means well known in the art (e.g. using a fluorimeter).

[0178] In another embodiment, determining the presence or absence of an interaction between a test molecule and a target molecule can be effected by monitoring surface plasmon resonance (see, e.g., Sjolander & Urbaniczk, Anal. Chem. 63: 2338-2345 (1991) and Szabo et al., Curr. Opin. Struct. Biol. 5: 699-705 (1995)). “Surface plasmon resonance” or “biomolecular interaction analysis (BIA)” can be utilized to detect biospecific interactions in real time, without labeling any of the interactants (e.g., BIAcore). Changes in the mass at the binding surface (indicative of a binding event) result in alterations of the refractive index of light near the surface (the optical phenomenon of surface plasmon resonance (SPR)), resulting in a detectable signal which can be used as an indication of real-time reactions between biological molecules.

[0179] In another embodiment, the target molecule or test molecules are anchored to a solid phase, facilitating the detection of target molecule/test molecule complexes and separation of the complexes from free, uncomplexed molecules. The target molecule or test molecule is immobilized to the solid support. In an embodiment, the target molecule is anchored to a solid surface, and the test molecule, which is not anchored, can be labeled, either directly or indirectly, with detectable labels discussed herein.

[0180] It may be desirable to immobilize a target molecule, an anti-target molecule antibody, and/or test molecules to facilitate separation of target molecule/test molecule complexes from uncomplexed forms, as well as to accommodate automation of the assay. The attachment between a test molecule and/or target molecule and the solid support may be covalent or non-covalent (see, e.g., U.S. Pat. No. 6,022,688 for non-covalent attachments). The solid support may be one or more surfaces of the system, such as one or more surfaces in each well of a microtiter plate, a surface of a silicon wafer, a surface of a bead (see, e.g., Lam, Nature 354: 82-84 (1991)) that is optionally linked to another solid support, or a channel in a microfluidic device, for example. Types of solid supports, linker molecules for covalent and non-covalent attachments to solid supports, and methods for immobilizing nucleic acids and other molecules to solid supports are well known (see, e.g., U.S. Pat. Nos. 6,261,776; 5,900,481; 6,133,436; and 6,022,688; and WIPO publication WO 01/18234).

[0181] In an embodiment, target molecule may be immobilized to surfaces via biotin and streptavidin. For example, biotinylated target polypeptide can be prepared from biotin-NHS (N-hydroxy-succinimide) using techniques known in the art (e.g., biotinylation kit, Pierce Chemicals, Rockford, Ill.), and immobilized in the wells of streptavidin-coated 96 well plates (Pierce Chemical). In another embodiment, a target polypeptide can be prepared as a fusion polypeptide. For example, glutathione-S-transferase/target polypeptide fusion can be adsorbed onto glutathione sepharose beads (Sigma Chemical, St. Louis, Mo.) or glutathione derivitized microtiter plates, which are then combined with a test molecule under conditions conducive to complex formation (e.g., at physiological conditions for salt and pH). Following incubation, the beads or microtiter plate wells are washed to remove any unbound components, or the matrix is immobilized in the case of beads, and complex formation is determined directly or indirectly as described above. Alternatively, the complexes can be dissociated from the matrix, and the level of target molecule binding or activity is determined using standard techniques.

[0182] In an embodiment, the non-immobilized component is added to the coated surface containing the anchored component. After the reaction is complete, unreacted components are removed (e.g., by washing) under conditions such that a significant percentage of complexes formed will remain immobilized to the solid surface. The detection of complexes anchored on the solid surface can be accomplished in a number of manners. Where the previously non-immobilized component is pre-labeled, the detection of label immobilized on the surface indicates that complexes were formed. Where the previously non-immobilized component is not pre-labeled, an indirect label can be used to detect complexes anchored on the surface, e.g., by adding a labeled antibody specific for the immobilized component, where the antibody, in turn, can be directly labeled or indirectly labeled with, e.g., a labeled anti-Ig antibody.

[0183] In another embodiment, an assay is performed utilizing antibodies that specifically bind target molecule or test molecule but do not interfere with binding of the target molecule to the test molecule. Such antibodies can be derivitized to a solid support, and unbound target molecule may be immobilized by antibody conjugation. Methods for detecting such complexes, in addition to those described above for the GST-immobilized complexes, include immunodetection of complexes using antibodies reactive with the target molecule, as well as enzyme-linked assays which rely on detecting an enzymatic activity associated with the target molecule.

[0184] Cell free assays also can be conducted in a liquid phase. In such an assay, reaction products are separated from unreacted components, by any of a number of standard techniques, including but not limited to: differential centrifugation (see, e.g., Rivas, G., and Minton, Trends Biochem Sci August; 18(8): 284-7 (1993)); chromatography (gel filtration chromatography, ion-exchange chromatography); electrophoresis (see, e.g., Ausubel et al., eds. Current Protocols in Molecular Biology, J. Wiley: New York (1999)); and immunoprecipitation (see, e.g., Ausubel et al., eds., supra). Media and chromatographic techniques are known to one skilled in the art (see, e.g., Heegaard, J Mol. Recognit. Winter; 11(1-6): 141-8 (1998); Hage & Tweed, J. Chromatogr. B Biomed. Sci. Appl. October 10; 699 (1-2): 499-525 (1997)). Further, fluorescence energy transfer may also be conveniently utilized, as described herein, to detect binding without further purification of the complex from solution.

[0185] In another embodiment, modulators of target molecule expression are identified. For example, a cell or cell free mixture is contacted with a candidate compound and the expression of target mRNA or target polypeptide is evaluated relative to the level of expression of target mRNA or target polypeptide in the absence of the candidate compound. When expression of target mRNA or target polypeptide is greater in the presence of the candidate compound than in its absence, the candidate compound is identified as an agonist of target mRNA or target polypeptide expression. Alternatively, when expression of target mRNA or target polypeptide is less (e.g., less with statistical significance) in the presence of the candidate compound than in its absence, the candidate compound is identified as an antagonist or inhibitor of target mRNA or target polypeptide expression. The level of target mRNA or target polypeptide expression can be determined by methods described herein.

[0186] In another embodiment, binding partners that interact with a target molecule are detected. The target molecules can interact with one or more cellular or extracellular macromolecules, such as polypeptides in vivo, and these interacting molecules are referred to herein as “binding partners.” Binding partners can agonize or antagonize target molecule biological activity. Also, test molecules that agonize or antagonize interactions between target molecules and binding partners can be useful as therapeutic molecules as they can up-regulate or down-regulated target molecule activity in vivo and thereby treat osteoporosis.

[0187] Binding partners of target molecules can be identified by methods known in the art. For example, binding partners may be identified by lysing cells and analyzing cell lysates by electrophoretic techniques. Alternatively, a two-hybrid assay or three-hybrid assay can be utilized (see, e.g., U.S. Pat. No. 5,283,317; Zervos et al., Cell 72:223-232 (1993); Madura et al., J. Biol. Chem. 268: 12046-12054 (1993); Bartel et al., Biotechniques 14: 920-924 (1993); Iwabuchi et al., Oncogene 8: 1693-1696 (1993); and Brent WO94/10300). A two-hybrid system is based on the modular nature of most transcription factors, which consist of separable DNA-binding and activation domains. The assay often utilizes two different DNA constructs. In one construct, a CETP, PROL4, GRID2, PDE4D or GPX3/TNIP1 nucleic acid (sometimes referred to as the “bait”) is fused to a gene encoding the DNA binding domain of a known transcription factor (e.g., GAL-4). In another construct, a DNA sequence from a library of DNA sequences that encodes a potential binding partner (sometimes referred to as the “prey”) is fused to a gene that encodes an activation domain of the known transcription factor. Sometimes, a CETP, PROL4, GRID2, PDE4D or GPX3/TNIP1 nucleic acid can be fused to the activation domain. If the “bait” and the “prey” molecules interact in vivo, the DNA-binding and activation domains of the transcription factor are brought into close proximity. This proximity allows transcription of a reporter gene (e.g., LacZ) which is operably linked to a transcriptional regulatory site responsive to the transcription factor. Expression of the reporter gene can be detected and cell colonies containing the functional transcription factor can be isolated and used to identify the potential binding partner.

[0188] In an embodiment for identifying test molecules that antagonize or agonize complex formation between target molecules and binding partners, a reaction mixture containing the target molecule and the binding partner is prepared, under conditions and for a time sufficient to allow complex formation. The reaction mixture often is provided in the presence or absence of the test molecule. The test molecule can be included initially in the reaction mixture, or can be added at a time subsequent to the addition of the target molecule and its binding partner. Control reaction mixtures are incubated without the test molecule or with a placebo. Formation of any complexes between the target molecule and the binding partner then is detected. Decreased formation of a complex in the reaction mixture containing test molecule as compared to in a control reaction mixture indicates that the molecule antagonizes target molecule/binding partner complex formation. Alternatively, increased formation of a complex in the reaction mixture containing test molecule as compared to in a control reaction mixture indicates that the molecule agonizes target molecule/binding partner complex formation. In another embodiment, complex formation of target molecule/binding partner can be compared to complex formation of mutant target molecule/binding partner (e.g., amino acid modifications in a target polypeptide). Such a comparison can be important in those cases where it is desirable to identify test molecules that modulate interactions of mutant but not non-mutated target gene products.

[0189] The assays can be conducted in a heterogeneous or homogeneous format. In heterogeneous assays, target molecule and/or the binding partner are immobilized to a solid phase, and complexes are detected on the solid phase at the end of the reaction. In homogeneous assays, the entire reaction is carried out in a liquid phase. In either approach, the order of addition of reactants can be varied to obtain different information about the molecules being tested. For example, test compounds that agonize target molecule/binding partner interactions can be identified by conducting the reaction in the presence of the test molecule in a competition format. Alternatively, test molecules that agonize preformed complexes, e.g., molecules with higher binding constants that displace one of the components from the complex, can be tested by adding the test compound to the reaction mixture after complexes have been formed.

[0190] In a heterogeneous assay embodiment, the target molecule or the binding partner is anchored onto a solid surface (e.g., a microtiter plate), while the non-anchored species is labeled, either directly or indirectly. The anchored molecule can be immobilized by non-covalent or covalent attachments. Alternatively, an immobilized antibody specific for the molecule to be anchored can be used to anchor the molecule to the solid surface. The partner of the immobilized species is exposed to the coated surface with or without the test molecule. After the reaction is complete, unreacted components are removed (e.g., by washing) such that a significant portion of any complexes formed will remain immobilized on the solid surface. Where the non-immobilized species is pre-labeled, the detection of label immobilized on the surface is indicative of complex. Where the non-immobilized species is not pre-labeled, an indirect label can be used to detect complexes anchored to the surface; e.g., by using a labeled antibody specific for the initially non-immobilized, species. Depending upon the order of addition of reaction components, test compounds that inhibit complex formation or that disrupt preformed complexes can be detected.

[0191] In another embodiment, the reaction can be conducted in a liquid phase in the presence or absence of test molecule, where the reaction products are separated from unreacted components, and the complexes are detected (e.g., using an immobilized antibody specific for one of the binding components to anchor any complexes formed in solution, and a labeled antibody specific for the other partner to detect anchored complexes). Again, depending upon the order of addition of reactants to the liquid phase, test compounds that inhibit complex or that disrupt preformed complexes can be identified.

[0192] In an alternate embodiment, a homogeneous assay can be utilized. For example, a preformed complex of the target gene product and the interactive cellular or extracellular binding partner product is prepared. One or both of the target molecule or binding partner is labeled, and the signal generated by the label(s) is quenched upon complex formation (e.g., U.S. Pat. No. 4,109,496 that utilizes this approach for immunoassays). Addition of a test molecule that competes with and displaces one of the species from the preformed complex will result in the generation of a signal above background. In this way, test substances that disrupt target molecule/binding partner complexes can be identified.

[0193] Candidate therapeutics for treating osteoporosis are identified from a group of test molecules that interact with a target molecule. Test molecules are normally ranked according to the degree with which they modulate (e.g. agonize or antagonize) a function associated with the target molecule (e.g., DNA replication and/or processing, RNA transcription and/or processing, polypeptide production and/or processing, and/or biological function/activity), and then top ranking modulators are selected. Also, pharmacogenomic information described herein can determine the rank of a modulator. The top 10% of ranked test molecules often are selected for further testing as candidate therapeutics, and sometimes the top 15%, 20%, or 25% of ranked test molecules are selected for further testing as candidate therapeutics. Candidate therapeutics typically are formulated for administration to a subject.

[0194] Therapeutic Formulations

[0195] Formulations and pharmaceutical compositions typically include in combination with a pharmaceutically acceptable carrier one or more target molecule modulators. The modulator often is a test molecule identified as having an interaction with a target molecule by a screening method described above. The modulator may be a compound, an antisense nucleic acid, a ribozyme, an antibody, or a binding partner. Also, formulations may comprise a target polypeptide or fragment thereof in combination with a pharmaceutically acceptable carrier.

[0196] As used herein, the term “pharmaceutically acceptable carrier” includes solvents, dispersion media, coatings, antibacterial and antifungal agents, isotonic and absorption delaying agents, and the like, compatible with pharmaceutical administration. Supplementary active compounds can also be incorporated into the compositions. Pharmaceutical compositions can be included in a container, pack, or dispenser together with instructions for administration.

[0197] A pharmaceutical composition typically is formulated to be compatible with its intended route of administration. Examples of routes of administration include parenteral, e.g., intravenous, intradermal, subcutaneous, oral (e.g., inhalation), transdermal (topical), transmucosal, and rectal administration. Solutions or suspensions used for parenteral, intradermal, or subcutaneous application can include the following components: a sterile diluent such as water for injection, saline solution, fixed oils, polyethylene glycols, glycerin, propylene glycol or other synthetic solvents; antibacterial agents such as benzyl alcohol or methyl parabens; antioxidants such as ascorbic acid or sodium bisulfite; chelating agents such as ethylenediaminetetraacetic acid; buffers such as acetates, citrates or phosphates and agents for the adjustment of tonicity such as sodium chloride or dextrose. pH can be adjusted with acids or bases, such as hydrochloric acid or sodium hydroxide. The parenteral preparation can be enclosed in ampoules, disposable syringes or multiple dose vials made of glass or plastic.

[0198] Oral compositions generally include an inert diluent or an edible carrier. For the purpose of oral therapeutic administration, the active compound can be incorporated with excipients and used in the form of tablets, troches, or capsules, e.g., gelatin capsules. Oral compositions can also be prepared using a fluid carrier for use as a mouthwash. Pharmaceutically compatible binding agents, and/or adjuvant materials can be included as part of the composition. The tablets, pills, capsules, troches and the like can contain any of the following ingredients, or compounds of a similar nature: a binder such as microcrystalline cellulose, gum tragacanth or gelatin; an excipient such as starch or lactose, a disintegrating agent such as alginic acid, Primogel, or corn starch; a lubricant such as magnesium stearate or Sterotes; a glidant such as colloidal silicon dioxide; a sweetening agent such as sucrose or saccharin; or a flavoring agent such as peppermint, methyl salicylate, or orange flavoring.

[0199] Pharmaceutical compositions suitable for injectable use include sterile aqueous solutions (where water soluble) or dispersions and sterile powders for the extemporaneous preparation of sterile injectable solutions or dispersion. For intravenous administration, suitable carriers include physiological saline, bacteriostatic water, Cremophor EL™ (BASF, Parsippany, N.J.) or phosphate buffered saline (PBS). In all cases, the composition must be sterile and should be fluid to the extent that easy syringability exists. It should be stable under the conditions of manufacture and storage and must be preserved against the contaminating action of microorganisms such as bacteria and fungi. The carrier can be a solvent or dispersion medium containing, for example, water, ethanol, polyol (for example, glycerol, propylene glycol, and liquid polyethylene glycol, and the like), and suitable mixtures thereof. The proper fluidity can be maintained, for example, by the use of a coating such as lecithin, by the maintenance of the required particle size in the case of dispersion and by the use of surfactants. Prevention of the action of microorganisms can be achieved by various antibacterial and antifungal agents, for example, parabens, chlorobutanol, phenol, ascorbic acid, thimerosal, and the like. In many cases, it will be preferable to include isotonic agents, for example, sugars, polyalcohols such as mannitol, sorbitol, sodium chloride in the composition. Prolonged absorption of the injectable compositions can be brought about by including in the composition an agent which delays absorption, for example, aluminum monostearate and gelatin.

[0200] Sterile injectable solutions can be prepared by incorporating the active compound in the required amount in an appropriate solvent with one or a combination of ingredients enumerated above, as required, followed by filtered sterilization. Generally, dispersions are prepared by incorporating the active compound into a sterile vehicle which contains a basic dispersion medium and the required other ingredients from those enumerated above. In the case of sterile powders for the preparation of sterile injectable solutions, the preferred methods of preparation are vacuum drying and freeze-drying which yields a powder of the active ingredient plus any additional desired ingredient from a previously sterile-filtered solution thereof.

[0201] For administration by inhalation, the compounds are delivered in the form of an aerosol spray from pressured container or dispenser which contains a suitable propellant, e.g., a gas such as carbon dioxide, or a nebulizer.

[0202] Systemic administration can also be by transmucosal or transdermal means. For transmucosal or transdermal administration, penetrants appropriate to the barrier to be permeated are used in the formulation. Such penetrants are generally known in the art, and include, for example, for transmucosal administration, detergents, bile salts, and fusidic acid derivatives. Transmucosal administration can be accomplished through the use of nasal sprays or suppositories. For transdermal administration, the active compounds are formulated into ointments, salves, gels, or creams as generally known in the art. Molecules can also be prepared in the form of suppositories (e.g., with conventional suppository bases such as cocoa butter and other glycerides) or retention enemas for rectal delivery.

[0203] In one embodiment, active molecules are prepared with carriers that will protect the compound against rapid elimination from the body, such as a controlled release formulation, including implants and microencapsulated delivery systems. Biodegradable, biocompatible polymers can be used, such as ethylene vinyl acetate, polyanhydrides, polyglycolic acid, collagen, polyorthoesters, and polylactic acid. Methods for preparation of such formulations will be apparent to those skilled in the art. Materials can also be obtained commercially from Alza Corporation and Nova Pharmaceuticals, Inc. Liposomal suspensions (including liposomes targeted to infected cells with monoclonal antibodies to viral antigens) can also be used as pharmaceutically acceptable carriers. These can be prepared according to methods known to those skilled in the art, for example, as described in U.S. Pat. No. 4,522,811.

[0204] It is advantageous to formulate oral or parenteral compositions in dosage unit form for ease of administration and uniformity of dosage. Dosage unit form as used herein refers to physically discrete units suited as unitary dosages for the subject to be treated; each unit containing a predetermined quantity of active compound calculated to produce the desired therapeutic effect in association with the required pharmaceutical carrier.

[0205] Toxicity and therapeutic efficacy of such compounds can be determined by standard pharmaceutical procedures in cell cultures or experimental animals, e.g., for determining the LD₅₀ (the dose lethal to 50% of the population) and the ED₅₀ (the dose therapeutically effective in 50% of the population). The dose ratio between toxic and therapeutic effects is the therapeutic index and it can be expressed as the ratio LD₅₀/ED₅₀. Molecules which exhibit high therapeutic indices are preferred. While molecules that exhibit toxic side effects may be used, care should be taken to design a delivery system that targets such compounds to the site of affected tissue in order to minimize potential damage to uninfected cells and, thereby, reduce side effects.

[0206] The data obtained from the cell culture assays and animal studies can be used in formulating a range of dosage for use in humans. The dosage of such molecules lies preferably within a range of circulating concentrations that include the ED₅₀ with little or no toxicity. The dosage may vary within this range depending upon the dosage form employed and the route of administration utilized. For any molecules used in the methods described herein, the therapeutically effective dose can be estimated initially from cell culture assays. A dose may be formulated in animal models to achieve a circulating plasma concentration range that includes the IC₅₀ (i.e., the concentration of the test compound which achieves a half-maximal inhibition of symptoms) as determined in cell culture. Such information can be used to more accurately determine useful doses in humans. Levels in plasma may be measured, for example, by high performance liquid chromatography.

[0207] As defined herein, a therapeutically effective amount of protein or polypeptide (i.e., an effective dosage) ranges from about 0.001 to 30 mg/kg body weight, sometimes about 0.01 to 25 mg/kg body weight, often about 0.1 to 20 mg/kg body weight, and more often about 1 to 10 mg/kg, 2 to 9 mg/kg, 3 to 8 mg/kg, 4 to 7 mg/kg, or 5 to 6 mg/kg body weight. The protein or polypeptide can be administered one time per week for between about 1 to 10 weeks, sometimes between 2 to 8 weeks, often between about 3 to 7 weeks, and more often for about 4, 5, or 6 weeks. The skilled artisan will appreciate that certain factors may influence the dosage and timing required to effectively treat a subject, including but not limited to the severity of the disease or disorder, previous treatments, the general health and/or age of the subject, and other diseases present. Moreover, treatment of a subject with a therapeutically effective amount of a protein, polypeptide, or antibody can include a single treatment or, preferably, can include a series of treatments.

[0208] With regard to polypeptide formulations, featured herein is a method for treating osteoporosis in a subject, which comprises contacting one or more cells in the subject with a first polypeptide, where the subject comprises a second polypeptide having one or more polymorphic variations associated with low BMD, and where the first polypeptide comprises fewer polymorphic variations associated with low BMD than the second polypeptide. The first and second polypeptides are encoded by a nucleic acid which comprises a nucleotide sequence in SEQ ID NO's:1-10; a nucleotide sequence which encodes a polypeptide consisting of an amino acid sequence encoded by a nucleotide sequence referenced in SEQ ID NO's:1-10; a nucleotide sequence which encodes a polypeptide that is 90% or more identical to an amino acid sequence encoded by a nucleotide sequence of SEQ ID NO's:1-10 and a nucleotide sequence 90% or more identical to a nucleotide sequence in SEQ ID NO's:1-10. The subject often is a human.

[0209] For antibodies, a dosage of 0.1 mg/kg of body weight (generally 10 mg/kg to 20 mg/kg) is often utilized. If the antibody is to act in the brain, a dosage of 50 mg/kg to 100 mg/kg is often appropriate. Generally, partially human antibodies and fully human antibodies have a longer half-life within the human body than other antibodies. Accordingly, lower dosages and less frequent administration is often possible. Modifications such as lipidation can be used to stabilize antibodies and to enhance uptake and tissue penetration (e.g., into the brain). A method for lipidation of antibodies is described by Cruikshank et al., J. Acquired Immune Deficiency Syndromes and Human Retrovirology 14:193 (1997).

[0210] Antibody conjugates can be used for modifying a given biological response, the drug moiety is not to be construed as limited to classical chemical therapeutic agents. For example, the drug moiety may be a protein or polypeptide possessing a desired biological activity. Such proteins may include, for example, a toxin such as abrin, ricin A, pseudomonas exotoxin, or diphtheria toxin; a polypeptide such as tumor necrosis factor, .alpha.-interferon, .beta.-interferon, nerve growth factor, platelet derived growth factor, tissue plasminogen activator; or, biological response modifiers such as, for example, lymphokines, interleukin-1 (“IL-1”), interleukin-2 (“IL-2”), interleukin-6 (“IL-6”), granulocyte macrophage colony stimulating factor (“GM-CSF”), granulocyte colony stimulating factor (“G-CSF”), or other growth factors. Alternatively, an antibody can be conjugated to a second antibody to form an antibody heteroconjugate as described by Segal in U.S. Pat. No. 4,676,980.

[0211] For compounds, exemplary doses include milligram or microgram amounts of the compound per kilogram of subject or sample weight, for example, about 1 microgram per kilogram to about 500 milligrams per kilogram, about 100 micrograms per kilogram to about 5 milligrams per kilogram, or about 1 microgram per kilogram to about 50 micrograms per kilogram. It is understood that appropriate doses of a small molecule depend upon the potency of the small molecule with respect to the expression or activity to be modulated. When one or more of these small molecules is to be administered to an animal (e.g., a human) in order to modulate expression or activity of a polypeptide or nucleic acid described herein, a physician, veterinarian, or researcher may, for example, prescribe a relatively low dose at first, subsequently increasing the dose until an appropriate response is obtained. In addition, it is understood that the specific dose level for any particular animal subject will depend upon a variety of factors including the activity of the specific compound employed, the age, body weight, general health, gender, and diet of the subject, the time of administration, the route of administration, the rate of excretion, any drug combination, and the degree of expression or activity to be modulated.

[0212] With regard to nucleic acid formulations, gene therapy vectors can be delivered to a subject by, for example, intravenous injection, local administration (see, e.g., U.S. Pat. No. 5,328,470) or by stereotactic injection (see e.g., Chen et al., (1994) Proc. Natl. Acad. Sci. USA 91:3054-3057). Pharmaceutical preparations of gene therapy vectors can include a gene therapy vector in an acceptable diluent, or can comprise a slow release matrix in which the gene delivery vehicle is imbedded. Alternatively, where the complete gene delivery vector can be produced intact from recombinant cells (e.g., retroviral vectors) the pharmaceutical preparation can include one or more cells which produce the gene delivery system. Examples of gene delivery vectors are described herein.

[0213] Therapeutic Methods

[0214] A therapeutic formulation described above can be administered to a subject in need of a therapeutic for inducing a desired biological response. Therapeutic formulations can be administered by any of the paths described herein. With regard to both prophylactic and therapeutic methods of treatment, such treatments may be specifically tailored or modified, based on knowledge obtained from pharmacogenomic analyses described herein.

[0215] As used herein, the term “treatment” is defined as the application or administration of a therapeutic formulation to a subject, or application or administration of a therapeutic agent to an isolated tissue or cell line from a subject with the purpose to cure, heal, alleviate, relieve, alter, remedy, ameliorate, improve or affect osteoporosis, symptoms of osteoporosis or a predisposition towards osteoporosis. A therapeutic formulation includes, but is not limited to, small molecules, peptides, antibodies, ribozymes and antisense oligonucleotides. Administration of a therapeutic formulation can occur prior to the manifestation of symptoms characteristic of low BMD, such that osteoporosis is prevented or delayed in its progression. The appropriate therapeutic composition can be determined based on screening assays described herein.

[0216] As discussed, successful treatment of osteoporosis can be brought about by techniques that serve to agonize target molecule expression or function, or alternatively, antagonize target molecule expression or function. These techniques include administration of modulators that include, but are not limited to, small organic or inorganic molecules; antibodies (including, for example, polyclonal, monoclonal, humanized, anti-idiotypic, chimeric or single chain antibodies, and Fab, F(ab′)₂ and Fab expression library fragments, scFV molecules, and epitope-binding fragments thereof); and peptides, phosphopeptides, or polypeptides.

[0217] Further, antisense and ribozyme molecules that inhibit expression of the target gene can also be used to reduce the level of target gene expression, thus effectively reducing the level of target gene activity. Still further, triple helix molecules can be utilized in reducing the level of target gene activity. Antisense, ribozyme and triple helix molecules are discussed above. It is possible that the use of antisense, ribozyme, and/or triple helix molecules to reduce or inhibit mutant gene expression can also reduce or inhibit the transcription (triple helix) and/or translation (antisense, ribozyme) of mRNA produced by normal target gene alleles, such that the concentration of normal target gene product present can be lower than is necessary for a normal phenotype. In such cases, nucleic acid molecules that encode and express target gene polypeptides exhibiting normal target gene activity can be introduced into cells via gene therapy method. Alternatively, in instances in that the target gene encodes an extracellular polypeptide, it can be preferable to co-administer normal target gene polypeptide into the cell or tissue in order to maintain the requisite level of cellular or tissue target gene activity.

[0218] Another method by which nucleic acid molecules may be utilized in treating or preventing osteoporosis is use of aptamer molecules specific for target molecules. Aptamers are nucleic acid molecules having a tertiary structure which permits them to specifically bind to ligands (see, e.g., Osborne, et al., Curr. Opin. Chem. Biol. 1(1): 5-9 (1997); and Patel, D. J., Curr. Opin. Chem. Biol. June; 1(1): 32-46 (1997)).

[0219] Yet another method of utilizing nucleic acid molecules for osteoporosis treatment is gene therapy, which can also be referred to as allele therapy. Provided herein is a gene therapy method for treating osteoporosis in a subject, which comprises contacting one or more cells in the subject or from the subject with a nucleic acid having a first nucleotide sequence. Genomic DNA in the subject comprises a second nucleotide sequence having one or more polymorphic variations associated with low BMD (e.g., the second nucleic acid has a nucleotide sequence in SEQ ID NO's:1-10). The first and second nucleotide sequences typically are substantially identical to one another, and the first nucleotide sequence comprises fewer polymorphic variations associated with low BMD than the second nucleotide sequence. The first nucleotide sequence may comprise a gene sequence that encodes a full-length polypeptide or a fragment thereof. The subject is often a human. Allele therapy methods often are utilized in conjunction with a method of first determining whether a subject has genomic DNA that includes polymorphic variants associated with low BMD.

[0220] In another allele therapy embodiment, provided herein is a method which comprises contacting one or more cells in the subject or from the subject with a polypeptide encoded by a nucleic acid having a first nucleotide sequence. Genomic DNA in the subject comprises a second nucleotide sequence having one or more polymorphic variations associated with low BMD (e.g., the second nucleic acid has a nucleotide sequence in SEQ ID NO's:1-10). The first and second nucleotide sequences typically are substantially identical to one another, and the first nucleotide sequence comprises fewer polymorphic variations associated with low BMD than the second nucleotide sequence. The first nucleotide sequence may comprise a gene sequence that encodes a full-length polypeptide or a fragment thereof. The subject is often a human.

[0221] For antibody-based therapies, antibodies can be generated that are both specific for target molecules and that reduce target molecule activity. Such antibodies may be administered in instances where antagonizing a target molecule function is appropriate for the treatment of osteoporosis.

[0222] In circumstances where stimulating antibody production in an animal or a human subject by injection with a target molecule is harmful to the subject, it is possible to generate an immune response against the target molecule by use of anti-idiotypic antibodies (see, e.g., Herlyn, Ann. Med.; 31(1): 66-78 (1999); and Bhattacharya-Chatterjee & Foon, Cancer Treat. Res.; 94: 51-68 (1998)). Introducing an anti-idiotypic antibody to a mammal or human subject often stimulates production of anti-anti-idiotypic antibodies, which typically are specific to the target molecule. Vaccines directed to osteoporosis also may be generated in this fashion.

[0223] In instances where the target molecule is intracellular and whole antibodies are used, internalizing antibodies may be preferred. Lipofectin or liposomes can be used to deliver the antibody or a fragment of the Fab region that binds to the target antigen into cells. Where fragments of the antibody are used, the smallest inhibitory fragment that binds to the target antigen is preferred. For example, peptides having an amino acid sequence corresponding to the Fv region of the antibody can be used. Alternatively, single chain neutralizing antibodies that bind to intracellular target antigens can also be administered. Such single chain antibodies can be administered, for example, by expressing nucleotide sequences encoding single-chain antibodies within the target cell population (see, e.g., Marasco et al., Proc. Natl. Acad. Sci. USA 90: 7889-7893 (1993)).

[0224] Modulators can be administered to a patient at therapeutically effective doses to treat osteoporosis. A therapeutically effective dose refers to an amount of the modulator sufficient to result in amelioration of symptoms of osteoporosis. Toxicity and therapeutic efficacy of modulators can be determined by standard pharmaceutical procedures in cell cultures or experimental animals, e.g., for determining the LD₅₀ (the dose lethal to 50% of the population) and the ED₅₀ (the dose therapeutically effective in 50% of the population). The dose ratio between toxic and therapeutic effects is the therapeutic index and it can be expressed as the ratio LD₅₀/ED₅₀. Modulators that exhibit large therapeutic indices are preferred. While modulators that exhibit toxic side effects can be used, care should be taken to design a delivery system that targets such molecules to the site of affected tissue in order to minimize potential damage to uninfected cells, thereby reducing side effects.

[0225] Data obtained from cell culture assays and animal studies can be used in formulating a range of dosages for use in humans. The dosage of such compounds lies preferably within a range of circulating concentrations that include the ED₅₀ with little or no toxicity. The dosage can vary within this range depending upon the dosage form employed and the route of administration utilized. For any compound used in the methods described herein, the therapeutically effective dose can be estimated initially from cell culture assays. A dose can be formulated in animal models to achieve a circulating plasma concentration range that includes the IC₅₀ (i.e., the concentration of the test compound that achieves a half-maximal inhibition of symptoms) as determined in cell culture. Such information can be used to more accurately determine useful doses in humans. Levels in plasma can be measured, for example, by high performance liquid chromatography.

[0226] Another example of effective dose determination for an individual is the ability to directly assay levels of “free” and “bound” compound in the serum of the test subject. Such assays may utilize antibody mimics and/or “biosensors” that have been created through molecular imprinting techniques. Molecules that modulate target molecule activity are used as a template, or “imprinting molecule”, to spatially organize polymerizable monomers prior to their polymerization with catalytic reagents. The subsequent removal of the imprinted molecule leaves a polymer matrix which contains a repeated “negative image” of the compound and is able to selectively rebind the molecule under biological assay conditions. A detailed review of this technique can be seen in Ansell et al., Current Opinion in Biotechnology 7: 89-94 (1996) and in Shea, Trends in Polymer Science 2: 166-173 (1994). Such “imprinted” affinity matrixes are amenable to ligand-binding assays, whereby the immobilized monoclonal antibody component is replaced by an appropriately imprinted matrix. An example of the use of such matrixes in this way can be seen in Vlatakis, et al., Nature 361: 645-647 (1993). Through the use of isotope-labeling, the “free” concentration of compound which modulates target molecule expression or activity readily can be monitored and used in calculations of IC₅₀. Such “imprinted” affinity matrixes can also be designed to include fluorescent groups whose photon-emitting properties measurably change upon local and selective binding of target compound. These changes readily can be assayed in real time using appropriate fiberoptic devices, in turn allowing the dose in a test subject to be quickly optimized based on its individual IC₅₀. An example of such a “biosensor” is discussed in Kriz et al., Analytical Chemistry 67: 2142-2144 (1995).

[0227] The examples set forth below are intended to illustrate but not limit the invention.

### EXAMPLES

[0228] In the following studies a group of subjects were selected according to specific parameters relating to low BMD. Nucleic acid samples obtained from individuals in the study group were subjected to genetic analysis, which identified associations between low BMD and certain polymorphic variants in CETP, PROL4, GRID2, PDE4D and GPX3 (herein referred to as “target genes”, “target nucleotides”, “target polypeptides” or simply “targets”). Methods are described for producing CETP, PROL4, GRID2, PDE4D and GPX3 polypeptides and polypeptide variants in vitro or in vivo. CETP, PROL4, GRID2, PDE4D and GPX3 nucleic acids or polypeptides and variants thereof are utilized for screening test molecules for those that interact with CETP, PROL4, GRID2, PDE4D and GPX3 molecules. Test molecules identified as being interactors with target polypeptides can be screened further as osteoporosis therapeutics.

### Example 1

### Samples and Pooling Strategies

[0229] Sample Selection

[0230] Blood samples were collected from individuals with low BMD, which were referred to as case samples. Also, blood samples were collected from individuals with high BMD (i.e., not diagnosed with osteoporosis or any form of osteoporosis-related disease); these samples served as gender and age-matched controls. All of the samples were of Caucasian (English) descent A database was created that listed all phenotypic trait information gathered from individuals for each case and control sample. Genomic DNA was extracted from each of the blood samples for genetic analyses.

[0231] DNA Extraction from Blood Samples

[0232] Six to ten milliliters of whole blood was transferred to a 50 ml tube containing 27 ml of red cell lysis solution (RCL). The tube was inverted until the contents were mixed. Each tube was incubated for 10 minutes at room temperature and inverted once during the incubation. The tubes were then centrifuged for 20 minutes at 3000×g and the supernatant was carefully poured off. 100-200 μl of residual liquid was left in the tube and was pipetted repeatedly to resuspend the pellet in the residual supernatant White cell lysis solution (WCL) was added to the tube and pipetted repeatedly until completely mixed. While no incubation was normally required, the solution was incubated at 37° C. or room temperature if cell clumps were visible after mixing until the solution was homogeneous. 2 ml of protein precipitation was added to the cell lysate. The mixtures were vortexed vigorously at high speed for 20 sec to mix the protein precipitation solution uniformly with the cell lysate, and then centrifuged for 10 minutes at 3000×g. The supernatant containing the DNA was then poured into a clean 15 ml tube, which contained 7 ml of 100% isopropanol. The samples were mixed by inverting the tubes gently until white threads of DNA were visible. Samples were centrifuged for 3 minutes at 2000×g and the DNA was visible as a small white pellet. The supernatant was decanted and 5 ml of 70% ethanol was added to each tube. Each tube was inverted several times to wash the DNA pellet, and then centrifuged for 1 minute at 2000×g. The ethanol was decanted and each tube was drained on clean absorbent paper. The DNA was dried in the tube by inversion for 10 minutes, and then 1000 μl of 1×TE was added. The size of each sample was estimated, and less TE buffer was added during the following DNA hydration step if the sample was smaller. The DNA was allowed to rehydrate overnight at room temperature, and DNA samples were stored at 2-8° C.

[0233] DNA was quantified by placing samples on a hematology mixer for at least 1 hour. DNA was serially diluted (typically 1:80, 1:160, 1:320, and 1:640 dilutions) so that it would be within the measurable range of standards. 125 μl of diluted DNA was transferred to a clear U-bottom microtitre plate, and 125 μl of 1×TE buffer was transferred into each well using a multichannel pipette. The DNA and 1×TE were mixed by repeated pipetting at least 15 times, and then the plates were sealed. 50 μl of diluted DNA was added to wells A5-H12 of a black flat bottom microtitre plate. Standards were inverted six times to mix them, and then 50 μl of 1×TE buffer was pipetted into well A1, 1000 ng/ml of standard was pipetted into well A2, 500 ng/ml of standard was pipetted into well A3, and 250 ng/ml of standard was pipetted into well A4. PicoGreen (Molecular Probes, Eugene, Oreg.) was thawed and freshly diluted 1:200 according to the number of plates that were being measured. PicoGreen was vortexed and then 50 μl was pipetted into all wells of the black plate with the diluted DNA. DNA and PicoGreen were mixed by pipetting repeatedly at least 10 times with the multichannel pipette. The plate was placed into a Fluoroskan Ascent Machine (microplate fluorometer produced by Labsystems) and the samples were allowed to incubate for 3 minutes before the machine was run using filter pairs 485 nm excitation and 538 nm emission wavelengths. Samples having measured DNA concentrations of greater than 450 ng/l were re-measured for conformation. Samples having measured DNA concentrations of 20 ng/μl or less were re-measured for confirmation.

[0234] Pooling Strategies

[0235] Samples were placed into one of two groups based on BMD levels. The two groups were made up of individuals with low BMD levels and individuals with high BMD levels. A select set of samples from each group were utilized to generate pools, and one pool was created for each group. Each individual sample in a pool was represented by an equal amount of genomic DNA. For example, where 25 ng of genomic DNA was utilized in each PCR reaction and there were 200 individuals in each pool, each individual would provide 125 pg of genomic DNA. Inclusion or exclusion of samples for a pool was based upon the following criteria: the sample was derived from an individual of Caucasian paternal and maternal descent; the database included relevant phenotype information for the individual; case samples were derived from individuals with low BMD; control samples were derived from individuals with normal or high BMD and no history of osteoporosis or osteoporosis-related diseases; and sufficient genomic DNA was extracted from each blood sample for all allelotyping and genotyping reactions performed during the study. Phenotype information included pre- or post-menopausal, familial predisposition, country or origin of mother and father, diagnosis with osteoporosis (date of primary diagnosis, age of individual as of primary diagnosis, osteoporosis-related fracture), biochemical measurements of markers of bone resorption (bone-specific alkaline Phosphatase, Urinary C-telopeptide of type I collagen, serum osteocalcin), current medication status (thyroid medication, hormone replacement therapy, steroid usage, bisphosphonates and cytotoxic agents for rheumatic diseases). Samples that met the inclusion criteria and did not meet the exclusion criteria were added to appropriate pools based on gender and disease status.

[0236] The selection process yielded the pools set forth in Table 2, which were used in the studies that follow. The average (mean) T-score in the High group is 1.56, and in the Low group −2.1 which means that on average individuals in the high BMD pool are 1.56 standard deviations above the average BMD in young females, whereas individuals in the low BMD pool are on average 2.1 standard deviations below the normal young value.

TABLE 2

| | Female High BMD | Female Low BMD |
|---|---|---|
| Pool size | 321 | 319 |
| (Number) | | |
| Mean T-score | 1.56 | −2.10 |
| (BMD leveles adjusted for | | |
| age and BMI) | | |
| Mean Age | 52.9 | 52.4 |
| (ex: years) | | |

### Example 2

### Association of Polymorphic Variants with Low BMD

[0237] A whole-genome screen was performed to identify particular SNPs associated with low BMD. As described in Example 1, two groups of samples were utilized, which included samples from female individuals having low BMD (osteoporosis cases), and samples from female individuals having high BMD levels (controls). The initial screen of each pool was performed in an allelotyping study, in which certain samples in each group were pooled. By pooling DNA from each group, an allele frequency for each SNP in each group was calculated. These allele frequencies were then compared to one another. Particular SNPs were considered as being associated with low BMD when allele frequency differences calculated between case and control pools were statistically significant. SNP disease association results obtained from the allelotyping study were then validated by genotyping each associated SNP across all samples from each pool. The results of the genotyping were then analyzed, allele frequencies for each group were calculated from the individual genotyping results, and a p-value was calculated to determine whether the case and control groups had statistically significantly differences in allele frequencies for a particular SNP. When the genotyping results agreed with the original allelotyping results, the SNP disease association was considered validated at the genetic level.

[0238] SNP Panel Used for Genetic Analyses

[0239] A whole-genome SNP screen began with an initial screen of approximately 25,000 SNPs over each set of disease and control samples using a pooling approach. The pools studied in the screen are described in Example 1. The SNPs analyzed in this study were part of a set of 25,488 SNPs confirmed as being statistically polymorphic as each is characterized as having a minor allele frequency of greater than 10%. The SNPs in the set reside in genes or in close proximity to genes, and many reside in gene exons. Specifically, SNPs in the set are located in exons, introns, and within 5,000 base-pairs upstream of a transcription start site of a gene. In addition, SNPs were selected according to the following criteria: they are located in ESTs; they are located in Locuslink or Ensemb1 genes; and they are located in Genomatix promoter predictions. SNPs in the set were also selected on the basis of even spacing across the genome, as depicted in Table 3. An additional 3088 SNPs were included with these 25,488 SNPs and these additional SNPs had been chosen on the basis of gene location, with preference to non-synonymous coding SNPs located in disease candidate genes.

TABLE 3

| General Statistics | | Spacing Statistics | |
|---|---|---|---|
| Total # of SNPs | 25,488 | Median | 37,058 bp |
| # of Exonic SNPs | >4,335 (17%) | Minimum* | 1,000 bp |
| # SNPs with | 20,776 (81%) | Maximum* | 3,000,000 bp |
| refSNP ID | | | |
| Gene Coverage | >10,000 | Mean | 122,412 bp |
| Chromosome | All | Std Deviation | 373,325 pb |
| Coverage | | | |

*Excludes outliers

[0240] Allelotyping and Genotyping Results

[0241] The genetic studies summarized above and described in more detail below identified allelic variants associated with low BMD. The allelic variants identified from the SNP panel described in Table 3 are summarized below in Table 4.

TABLE 4

| | | | | | | | | | | Low |
|---|---|---|---|---|---|---|---|---|---|---|
| | | | Position | | | | | | | BMD |
| SNP | | Chromosome | in SEQ | Contig | Contig | Sequence | | Sequence | Allelic | Assoc. |
| Reference | Chromosome | Position | ID Nos | Identification | Position | Identification | Locus | Position | Variability | Allele |
| rs1801706 | 16q21 | 57068823 | 50109 | NT_010498 | 10631861 | NM_000078 | CETP | UTR | AG | G |
| rs1047699 | 12p13 | 11143886 | 49075 | NT_009714 | 3758682 | NM_007244 | PROL4 | Exon: | CT | C |
| | | | | | | | | R120Q | | |
| rs1948017 | 4q22 | 94636365 | 49110 | NT_016354 | 18829520 | NM_001510 | GRID2 | Intron | CT | C |
| rs1498608 | 5q12 | 59895580 | 49652 | NT_006713 | 8937426 | NM_006203 | PDE4D | Intron | AT | T |
| rs869975 | 5q23 | 150475233 | 50082 | NT_029289 | 11569308 | NM_002084 | GPX3 | Intron | AG | G |

[0242] Table 4 includes information pertaining to the incident polymorphic variant associated with low BMD identified herein. Public information pertaining to the polymorphism and the genomic sequence that includes the polymorphism are indicated. The genomic sequences identified in Table 4 may be accessed at the http address www.ncbi.nih.gov/entrez/query.fcgi, for example, by using the publicly available SNP reference number (e.g., rs1801706). The chromosome position refers to the position of the SNP within NCBI's Genome Build 34, which may be accessed at the following http address: www.ncbi.nlm.nih.gov/mapview/map_search.cgi?chr=hum_chr.inf&query=. The “Contig Position” provided in Table 4 corresponds to a nucleotide position set forth in the contig sequence, and designates the polymorphic site corresponding to the SNP reference number. The sequence containing the polymorphisms also may be referenced by the “Sequence Identification” set forth in Table 4. The “Sequence Identification” corresponds to cDNA sequence that encodes associated target polypeptides (e.g., CETP) of the invention. The position of the SNP within the cDNA sequence is provided in the “Sequence Position” column of Table 4. Also, the allelic variation at the polymorphic site and the allelic variant identified as associated with low BMD is specified in Table 4. All nucleotide sequences referenced and accessed by the parameters set forth in Table 4 are incorporated herein by reference.

[0243] Assay for Verifying, Allelotyping, and Genotyping SNPs

[0244] A MassARRAY® system (Sequenom, Inc.) was utilized to perform SNP genotyping in a high-throughput fashion. This genotyping platform was complemented by a homogeneous, single-tube assay method (hME™ or homogeneous MassEXTEND™ (Sequenom, Inc.)) in which two genotyping primers anneal to and amplify a genomic target surrounding a polymorphic site of interest. A third primer (the MassEXTEND™ primer), which is complementary to the amplified target up to but not including the polymorphism, was then enzymatically extended one or a few bases through the polymorphic site and then terminated.

[0245] For each polymorphism, SpectroDESIGNER™ software (Sequenom, Inc.) was used to generate a set of PCR primers and a MassEXTEND™ primer was used to genotype the polymorphism. Table 5 shows PCR primers and Table 6 shows extension primers used for analyzing polymorphisms. The initial PCR amplification reaction was performed in a 5 A1 total volume containing 1×PCR buffer with 1.5 mM MgCl₂ (Qiagen), 200 μM each of dATP, dGTP, dCTP, dTTP (Gibco-BRL), 2.5 ng of genomic DNA, 0.1 units of HotStar DNA polymerase (Qiagen), and 200 nM each of forward and reverse PCR primers specific for the polymorphic region of interest.

TABLE 5
PCR Primers

| Reference | Forward | Reverse |
|---|---|---|
| SNP ID | PCR primer | PCR primer |
| rs1801706 | ACGTTGGATGTTGTAGCAG | ACGTTGGATGTCCATCTCCG |
| | AAGGCAAGCAC | TACTCCTAAC |
| rs1047699 | GATTACCAGAGTGGTTGCT | CCTGCAGGAAGCATCATCAT |
| | C | |
| rs1948017 | GTTTAACAGCAACCATTGA | CCCCAAAGGTATGTTAAGAG |
| | GG | |
| rs1498608 | GAATCCCTGTTCATTCCTT | ATACCTAGGTATAACCTCGG |
| | G | |
| rs869975 | AACTCACTGGTGATCCTGC | TGTCTCATCCACACCACTCC |
| | G | |

[0246] Samples were incubated at 95° C. for 15 minutes, followed by 45 cycles of 95° C. for 20 seconds, 56° C. for 30 seconds, and 72° C. for 1 minute, finishing with a 3 minute final extension at 720° C. Following amplification, shrimp alkaline phosphatase (SAP) (0.3 units in a 2 μl volume) (Amersham Pharmacia) was added to each reaction (total reaction volume was 7 μl) to remove any residual dNTPs that were not consumed in the PCR step. Samples were incubated for 20 minutes at 37° C., followed by 5 minutes at 85° C. to denature the SAP.

[0247] Once the SAP reaction was complete, a primer extension reaction was initiated by adding a polymorphism-specific MassEXTEND™ primer cocktail to each sample. Each MassEXTEND™ cocktail included a specific combination of dideoxynucleotides (ddNTPs) and deoxynucleotides (dNTPs) used to distinguish polymorphic alleles from one another. In Table 6, ddNTPs are shown and the fourth nucleotide not shown is the dNTP.

TABLE 6
Extend Primers

| Reference | Extend | Term |
|---|---|---|
| SNP ID | Probe | Mix |
| rs1801708 | CCTGGTGTCTCCTCCAGC | ACT |
| rs1047699 | TGTCTTGCTGGTCTGTCCCTC | ACG |
| rs1948017 | CAGCAACCATTGAGGGTGAAT | ACG |
| rs1498608 | CCCTAAAAACTGTTCCAGGTA | CGT |
| rs869975 | GGGCCTCAGTAGTTCCAGC | ACT |

[0248] The MassEXTEND™ reaction was performed in a total volume of 9 μl, with the addition of 1× ThermoSequenase buffer, 0.576 units of ThermoSequenase (Amersham Pharmacia), 600 nM MassEXTEND™ primer, 2 mM of ddATP and/or ddCTP and/or ddGTP and/or ddTTP, and 2 mM of dATP or dCTP or dGTP or dTTP. The deoxy nucleotide (dNTP) used in the assay normally was complementary to the nucleotide at the polymorphic site in the amplicon. Samples were incubated at 94° C. for 2 minutes, followed by 55 cycles of 5 seconds at 94° C., 5 seconds at 52° C., and 5 seconds at 72° C.

[0249] Following incubation, samples were desalted by adding 16 μl of water (total reaction volume was 25 μl), 3 mg of SpectroCLEAN™ sample cleaning beads (Sequenom, Inc.) and allowed to incubate for 3 minutes with rotation. Samples were then robotically dispensed using a piezoelectric dispensing device (SpectroJET™ (Sequenom, Inc.)) onto either 96-spot or 384-spot silicon chips containing a matrix that crystallized each sample (SpectroCHIP® (Sequenom, Inc.)). Subsequently, MALDI-TOF mass spectrometry (Biflex and Autoflex MALDI-TOF mass spectrometers (Bruker Daltonics) can be used) and SpectroTYPER RT™ software (Sequenom, Inc.) were used to analyze and interpret the SNP genotype for each sample.

[0250] Genetic Analysis

[0251] Variations identified in the target genes are provided in their respective genomic sequences (see SEQ ID NOs:1-4) Minor allelic frequencies for these polymorphisms was verified as being 10% or greater by determining the allelic frequencies using the extension assay described above in a group of samples isolated from 92 individuals originating from the state of Utah in the United States, Venezuela and France (Coriell cell repositories).

[0252] Genotyping results for the allelic variant set forth in Table 4 are shown for female pools in Table 7. In Table 7, “F case” and “F control” refer to female case (low BMD) and female control (high BMD) groups, and “AF” refers to allele frequency.

TABLE 7
Female Genotype Results

| | | | | | Low BMD |
|---|---|---|---|---|---|
| SNP | F AF case | F AF control | | Odds | Associated |
| Reference | (low) | (high) | p-value | Ratio | Allele |
| ra1801706 | A = 0.15 | A = 0.19 | 0.00765 | 0.661 | G |
| | G = 0.85 | G = 0.81 | | | |
| rs1047699 | C = 0.85 | C = 0.78 | 0.000594 | 1.65 | C |
| | T = 0.15 | T = 0.22 | | | |
| rs1948017 | C = 0.14 | C = 0.10 | 0.0188 | 1.51 | C |
| | T = 0.86 | T = 0.90 | | | |
| rs1498608 | A = 0.09 | A = 0.12 | 0.0347 | 0.672 | T |
| | T = 0.91 | T = 0.88 | | | |
| rs869975 | A = 0.05 | A = 0.10 | 0.000243 | 0.441 | G |
| | G = 0.95 | G = 0.90 | | | |

[0253] The single marker alleles set forth in Table 7 were considered validated, since the genotyping data were significantly associated with low BMD, and because the genotyping results agreed with the original allelotyping results. Particularly significant associations with low BMD are indicated by a calculated p-value of less than 0.05 for genotype results, which are set forth in bold text.

[0254] Odds ratio results are shown in Table 7 (and other Tables below). An odds ratio is an unbiased estimate of relative risk which can be obtained from most case-control studies. Relative risk (RR) is an estimate of the likelihood of disease in the exposed group (susceptibility allele or genotype carriers) compared to the unexposed group (not carriers). It can be calculated by the following equation:
RR=IA/Ia

[0255] IA is the incidence of disease in the A carriers and Ia is the incidence of disease in the non-carriers.

[0256] RR>1 indicates the A allele increases disease susceptibility.

[0257] RR<1 indicates the a allele increases disease susceptibility.

[0258] For example, RR=1.5 indicates that carriers of the A allele have 1.5 times the risk of disease than non-carriers, i.e., 50% more likely to get the disease.

[0259] Case-control studies do not allow the direct estimation of IA and Ia, therefore relative risk cannot be directly estimated. However, the odds ratio (OR) can be calculated using the following equation:
OR=(nDAnda)/(ndAnDa)=pDA(1−pdA)/pdA(1−pDA), or

[0260] OR=((case f)/(1−case f)/((control f)/(1−control f)), where f=susceptibility allele frequency.

[0261] An odds ratio can be interpreted in the same way a relative risk is interpreted and can be directly estimated using the data from case-control studies, i.e., case and control allele frequencies. The higher the odds ratio value, the larger the effect that particular allele has on the development of low BMD. Possessing an allele associated with a relatively high odds ratio translates to having a higher risk of developing or having low BMD.

### Example 3

### CETP Region Proximal SNPs

[0262] It has been discovered that a polymorphic variation (rs1801706) in a gene encoding CETP is associated with the occurrence of low BMD (see Examples 1 and 2). Ninety-one additional allelic variants proximal to rs1801706 were identified and subsequently allelotyped in low BMD case and high BMD control sample sets as described in Examples 1 and 2. The polymorphic variants are set forth in Table 8. The chromosome positions provided in column four of Table 8 are based on Genome “Build 34” of NCBI's GenBank. The “genome letter” corresponds to the particular allele that appears in NCBI's build 34 genomic sequence of the region (chromosome 16: positions 56743155-56840953), and the “deduced iupac” corresponds to the single letter IUPAC code for the CTEP polymorphic variants as they appear in SEQ ID NO:1. Also, the “genome letter” may differ from the alleles (A1/A2) provided in Table 8 (and in subsequent Tables that provide the same information) if the genome letter is on one stand and the alleles are on the complementary strand, thus having different strand orientations (i.e., reverse vs forward).

TABLE 8

| | Position in | | Chromosome | Alleles | Genome | Deduced |
|---|---|---|---|---|---|---|
| dbSNP | SEQ ID NO: 1 | Chromosome | Position | (A1/A2) | letter | iupac |
| 7500979 | 205 | 16 | 56743155 | g/a | g | R |
| 2217332 | 1595 | 16 | 56744545 | g/a | g | R |
| 8044804 | 2650 | 16 | 56745600 | c/t | a | R |
| 2270835 | 5496 | 16 | 56748446 | c/t | t | Y |
| 2133783 | 5782 | 16 | 56748732 | g/a | a | R |
| 247609 | 5908 | 16 | 56748858 | c/t | g | R |
| 952440 | 7552 | 16 | 56750502 | g/a | a | R |
| 881598 | 9191 | 16 | 56752141 | t/c | g | R |
| 2291955 | 10127 | 16 | 56753077 | g/a | t | Y |
| 2518054 | 10345 | 16 | 56753295 | g/a | g | R |
| 866038 | 10399 | 16 | 56753349 | t/c | c | Y |
| 1436425 | 12028 | 16 | 56754978 | g/a | a | R |
| 173537 | 13355 | 16 | 56756305 | a/g | t | Y |
| 247611 | 13687 | 16 | 56756637 | a/g | g | R |
| 166017 | 14328 | 16 | 56757278 | t/c | c | Y |
| 173538 | 14746 | 16 | 56757696 | c/t | t | Y |
| 193694 | 14996 | 16 | 56757946 | t/c | c | Y |
| 7205692 | 19361 | 16 | 56762311 | g/a | a | R |
| 8048746 | 21775 | 16 | 56764725 | g/a | a | R |
| 247618 | 23250 | 16 | 56766200 | g/a | g | R |
| 183130 | 23810 | 16 | 56766760 | c/t | c | Y |
| 6499863 | 24464 | 16 | 56767414 | g/a | g | R |
| 4783961 | 27341 | 16 | 56770291 | g/a | g | R |
| 3816117 | 28605 | 16 | 56771555 | c/t | t | Y |
| 711752 | 28658 | 16 | 56771608 | g/a | g | R |
| 708272 | 28735 | 16 | 56771685 | c/t | g | R |
| 1864163 | 29680 | 16 | 56772630 | g/a | g | R |
| 4369653 | 29998 | 16 | 56772948 | g/a | c | Y |
| 1864165 | 32521 | 16 | 56775471 | c/t | c | Y |
| 891141 | 36170 | 16 | 56779120 | t/g | g | K |
| 891143 | 36427 | 16 | 56779377 | c/t | t | Y |
| 7205804 | 37336 | 16 | 56780286 | g/a | g | R |
| 5885 | 37718 | 16 | 56780668 | c/t | c | Y |
| 1532625 | 37748 | 16 | 56780698 | a/g | c | Y |
| 1532624 | 37926 | 16 | 56780876 | t/g | c | M |
| 289712 | 38752 | 16 | 56781702 | g/a | c | Y |
| 7499892 | 39037 | 16 | 56781987 | c/t | c | Y |
| 5883 | 39800 | 16 | 56782750 | c/t | c | Y |
| 289714 | 39898 | 16 | 56782848 | c/t | g | R |
| 158480 | 40674 | 16 | 56783624 | c/t | g | R |
| 289717 | 41835 | 16 | 56784785 | c/t | g | R |
| 4344729 | 42325 | 16 | 56785275 | c/t | g | R |
| 289718 | 42379 | 16 | 56785329 | a/g | c | Y |
| 289719 | 42388 | 16 | 56785338 | g/a | t | Y |
| 2033254 | 42432 | 16 | 56785382 | c/t | t | Y |
| 4784744 | 43632 | 16 | 56786582 | g/a | g | R |
| 291044 | 43899 | 16 | 56786849 | c/t | g | R |
| 8053613 | 44273 | 16 | 56787223 | c/t | c | Y |
| 5881 | 44459 | 16 | 56787409 | a/g | g | R |
| 5880 | 47538 | 16 | 56790488 | c/g | g | S |
| 7198026 | 47692 | 16 | 56790642 | c/t | t | Y |
| 5882 | 48539 | 16 | 56791489 | g/a | g | R |
| 8045701 | 48749 | 16 | 56791699 | c/t | t | Y |
| 289741 | 49921 | 16 | 56792871 | a/g | g | R |
| 1801706 | 50109 | 16 | 56793059 | a/g | g | R |
| 289742 | 50209 | 16 | 56793159 | c/g | c | S |
| 289743 | 50243 | 16 | 56793193 | c/t | g | R |
| 289746 | 52652 | 16 | 56795602 | g/a | c | Y |
| 172337 | 55195 | 16 | 56798145 | c/t | t | Y |
| 289747 | 56385 | 16 | 56799335 | a/g | c | Y |
| 1566439 | 57109 | 16 | 56800059 | a/g | t | Y |
| 7205459 | 57618 | 16 | 56800568 | c/t | t | Y |
| 289749 | 58741 | 16 | 56801691 | t/c | g | R |
| 289751 | 59222 | 16 | 56802172 | t/c | g | R |
| 8059220 | 60771 | 16 | 56803721 | c/t | c | Y |
| 8058353 | 60962 | 16 | 56803912 | g/a | g | R |
| 289735 | 62009 | 16 | 56804959 | a/g | c | Y |
| 289737 | 64589 | 16 | 56807539 | t/g | a | M |
| 291042 | 66054 | 16 | 56809004 | g/a | a | R |
| 1875236 | 66143 | 16 | 56809093 | c/t | g | R |
| 821466 | 67822 | 16 | 56810772 | a/g | t | Y |
| 821465 | 68805 | 16 | 56811755 | c/g | c | S |
| 4275846 | 70075 | 16 | 56813025 | c/t | g | R |
| 289707 | 70350 | 16 | 56813300 | a/g | t | Y |
| 821463 | 71214 | 16 | 56814164 | g/a | t | Y |
| 289706 | 79549 | 16 | 56822499 | c/t | c | Y |
| 1167741 | 82760 | 16 | 56825710 | c/t | c | Y |
| 2052880 | 86463 | 16 | 56829413 | a/c | g | K |
| 1167742 | 86533 | 16 | 56829483 | c/g | c | S |
| 1183256 | 87019 | 16 | 56829969 | a/g | a | R |
| 1651665 | 88910 | 16 | 56831860 | a/c | a | M |
| 1651666 | 88955 | 16 | 56831905 | c/t | c | Y |
| 4784751 | 89021 | 16 | 56831971 | c/t | c | Y |
| 1651667 | 89056 | 16 | 56832006 | a/g | a | R |
| 8052091 | 89863 | 16 | 56832813 | g/a | g | R |
| 1684574 | 89879 | 16 | 56832829 | t/c | t | Y |
| 1684575 | 90066 | 16 | 56833016 | t/g | g | K |
| 1672865 | 90101 | 16 | 56833051 | a/g | a | R |
| 821470 | 91029 | 16 | 56833979 | g/a | a | R |
| 1549669 | 91434 | 16 | 56834384 | t/g | a | M |
| 291040 | 93636 | 16 | 56836586 | t/c | t | Y |
| 289754 | 98003 | 16 | 56840953 | c/t | c | Y |

[0263] Assay for Verifying and Allelotyping SNPs

[0264] The methods used to verify and allelotype the proximal SNPs of Table 8 are the same methods described in Examples 1 and 2 herein. The primers and probes used in these assays are provided in Table 9 and Table 10, respectively.

TABLE 9

| | | |
|---|---|---|
| dbSNP | | |
| rs# | Forward PCR primer | Reverse PCR primer |

| | | |
|---|---|---|
| 7500979 | TTGTATATGTAGGGTCCTGC | AAAATAATTCAAAACCACTG |
| 2217332 | ATCCAACAACAGCTTCCCAG | GGTGAAATGCTGACCTGTGT |
| 8044804 | ATAAATACAACCCAGCCCAC | CATTTCATTTCCCTGCACTG |
| 2270835 | CATTTACCATGTAACTGCCG | GGGTTGAGTATGAACAAATG |
| 2133783 | ACACTCATCCCTCCATTCTG | TCCCGGGAATTGAAGGGAAT |
| 247609 | GTCACTAAACTATGTATCAG | GGGTAGAGTGTAAATGACAG |
| 952440 | AGTCAGTGCCTGACTTTACC | CATACTGAGGCATGGAACAG |
| 881598 | ACTGCACTCCAGCCTGGGTGA | TGCTCCTGGCAGCAAATATC |
| 2291955 | GCTAGACATGTTTTAGCAGG | CCCCTTAGTTTAAAGTAAAGC |
| 2518054 | CTGATCATTCTTACCGGCAC | CTAGACAGTCAACAACTGAG |
| 866038 | CAAGGAACAAAGCAAGACCC | GTGCCGGTAAGAATGATCAG |
| 1436425 | GTATTCAGAGTGGTGTGTGG | GGGACATGGCAGAAATTCAG |
| 173537 | TCCCTGTCCTTGAACTCATC | CCTCTTGGGTCTTGTAGTCG |
| 247611 | AGGGTCCTCCATGATTGGAG | TTTCTGGACCTGACTGGGTG |
| 166017 | TAGATGGGCTGTTTCTACTG | AGGGAAGATTCCAGTAAAGC |
| 173538 | TCCCAAAGTGCTGGGATTAC | GGGTTTCTCAAAGGGCTAAG |
| 193694 | TCCTTCCGTGATCTCACAAC | CACACCAAAAGAACTGCATG |
| 7205692 | TCTTAGCCTGGGACTTTCTG | AAAAGCAGCTGTGACCTAAG |
| 8048746 | CAAGTTCTTCCTCCATCCAC | TTCCTCTCTCTGGGCTTATC |
| 247618 | TTTTCCCCCTTTTTGGGGC | TGGGTTGTCACAGCAAGGTGG |
| 183130 | ATAAACGGGAAAGAAGAGAC | AGGGTGGAGAATCTACAGAA |
| 6499863 | GTCTTGACAGGTTTGAGGAG | CATCAGACAGATCCCAACAG |
| 4783961 | GAAACATGAGTCGGGATGGC | AGCTTTGGTATTGGAGCAGG |
| 3816117 | ACTAGCCCAGAGAGAGGAGT | AAGAACTTGACCTTGAAGGC |
| 711752 | CACAAATCCCTATACCTGGC | TCGCCTTCAAGGTCAAGTTC |
| 708272 | AACCTGGCTCAGATCTGAAC | GCCAGGTATAGGGATTTGTG |
| 1864163 | TTAGAGGGGCTGTTGGAGAG | AGAGCCTGACACCTTCCCTA |
| 4369653 | AGTATCTTGACTTTATTTGG | GAAAAAAATATATGATAAAGG |
| 1864165 | TAAAAGGCTAGAAGTCCACC | AATTAATTCTCCCCTATAGC |
| 891141 | AGGCCCAGCCTGGGAAGTTT | TATCAGATGGTATCCACATG |
| 891143 | TCGTGCCCATCCTGTTAGTG | CACAAGCATGCCCTGTGTGG |
| 7205804 | AGGCAGCAAGCACCACAATG | ATGAACGGTGCCTGGTACAC |
| 5885 | GCAAAGAGATCAACGTCATC | ATGCAGACAGAAACGCACTCA |
| 1532625 | ACTGCTGTCTTCTGAGGCAT | CATCATGGCCGATTTTGTCC |
| 1532624 | TCTATAGACTTGCCCAACGC | TACTTTGGCAAATCTCTGCC |
| 289712 | ATTCGGCTTCTGTCATCCTC | GGGTCCAAAGCTTTTGTCAG |
| 7499892 | TGGCTGACTGGCCTGACCAC | CCCTCCATTCTGTACCACTTA |
| 5883 | TACTTCTGGTTCTCTGAGCG | TTGAACTCGTCTCCCATCAG |
| 289714 | ACACACACATACCACATGCC | TGATGGGAGACGAGTTCAAG |
| 158480 | TGAGTAGTTGGGACTATAGG | ACCCCTGTCTCTACAAAAAT |
| 289717 | CTCTGAGCCCAGAGTTGATC | CATTCCCTGCTCCATTTCCC |
| 4344729 | GCCTGAGTTCAGAAGGGAAG | GGCCGTTCTCCTGTTCTAAC |
| 289718 | GCCTGCCCAATATTGTGAGT | TCTTCCCTTCTGAACTCAGG |
| 289719 | TCTTCCCTTCTGAACTCAGG | GCCTGCCCAATATTGTGAGT |
| 2033254 | CACAACTCACAATATTGGGC | CAAAGGAACAGGACTCAGAC |
| 4784744 | ATCACATGCCCCAAGAAACC | CCGGCCCTTTCTTTCTTTTG |
| 291044 | AGGGCATCCCAGAACAGAAC | TGACTAGGTCAGGTCCCCTC |
| 8053613 | GAGTTCAGGGTAGGAATAGC | GCTGTGCAAATTAGGACTCT |
| 5881 | GACCCCTGTCTTCCACAGGT | ATCTTGGGCATCTTGAGGCA |
| 5880 | TTTCTCTCCCCAGGATATCG | CCAAGAGGCTTAAGAAGAGC |
| 7198026 | TGTTGGTGGGGAAATGTGGC | ACGAAGATTCTATCTAGGCA |
| 5882 | TCCAGGGAGGACTCACCATG | TGACTGCAGGAAGCTCTGG |
| 8045701 | TTGATACTTAGCGGTCCTGG | TAATATTCTGCAGGTAAACC |
| 289741 | TCTACCAGCTTGGCTCCCTC | AAGGGAGGGGCAGTAGGAGA |
| 1801706 | GTAGCAGAAGGCAAGCAC | AGGGAGGAGTTGGGAGCC |
| 289742 | ACTGGTGAGACAATCCCTTC | CCACTGGCATTAAAGTGCTG |
| 289743 | TGAAAAGAGGTGGACGGCAC | AGTCCTTCTTCTGTGGCTGG |
| 289746 | GAGGCTTACCAAAATGGGAC | AGAGCTTCTAGGCTTGGATG |
| 172337 | AGCTGGACTTTGAGGATGGC | AAGGAGAGGAGGGACTGGAG |
| 289747 | GTTGTTTAGGCCAAAAAGTC | CAATTACGGAAGTTACACTG |
| 1566439 | AAGCCCATGGCTTTTCAAGG | AGATCCTGGAGCCTCATTGT |
| 7205459 | GCAGAGGGGAAAGATCTTGG | AAGAGGGTATGTGTGTTGG |
| 289749 | TGAACTAAGGACCAGGCAAG | GCTCACATCCTTAGATTGCC |
| 289751 | AAATGATATGGAATTATGCG | TATCTTTCCAAATGTTTTAC |
| 8059220 | ACCTGCCATCATGAGTGCAT | TAGAGCAGGGCCTGGTGTGT |
| 8058353 | CCCTACAAGAAGGCTACATC | AGTGACTGCAGTGAAGAAGG |
| 289735 | CAAGGCATGCATGCTCCTTC | ATCGCCAGACCCTCAAGAAC |
| 289737 | GCAAGGAAGACTGATTCGTG | AGCCTCAAGTCACTGATGTC |
| 291042 | TGTCTCCCCATAACCAACAC | AAGAAACAGCTCCCAGTCTG |
| 1875236 | GAGCTGAGTGATTCTTGTCC | AATATGGTCAACTTGGTGGC |
| 821466 | AAGGAAGGAAGTGAGGGATG | GGAAAGCAAAGGAATGGCAG |
| 821465 | CACTGTTTACAATAGCCAAG | TGGAATTACAGGCGTGAGCT |
| 4275846 | GCAGCTGAGCAAAGATATGG | TGGACCTCTTCTATCATCAC |
| 289707 | CTCCTTCCTTCTGCTATCTC | ACCAAGATTCAGGCACTGAG |
| 821463 | CGTCTGCTGGGACACTGAAA | GCACCTGGAAGATTTATGGG |
| 289706 | TTAAGTCCTTTACCAAAGGG | TGAATGTGGCTTTACCAAGG |
| 1167741 | GCCCTATTTACGTGGATTTG | GCTCTGATTGTGTCTCTGTG |
| 2052880 | CATCAAGACTCCATGGAGAG | AGTCAAGAACCAGTCCCTAC |
| 1167742 | CCCTAGAAACTCCCTTATCC | TGAGTGGGGTACAGATGAAC |
| 1183256 | AGCTCAACTCCCCCCAAGTT | GAAGATAGGTGAGTTGAGGG |
| 1651665 | AAGTGAGAACAGGCTTCCTG | TCAAGGCTTTAGCTTGTCCC |
| 1651666 | TCTAACCTGGAACCCCTCAG | ATGAAGCCTGACACTTTGGG |
| 4784751 | CAAAGTGTCAGGCTTCATGG | AGCTGTGGGTGAGTGTCAAG |
| 1651667 | TCCCGACTTGTACACCTTGG | AGAAAATCAGCCAAAGGCTC |
| 8052091 | AGTCTTGCAGTCCAGGATG | TTCCCTGATGGACAGATGGC |
| 1684574 | TCTTGCAGTCCAGGATGCAG | GGCCATTTAGTGCTTGGAGC |
| 1684575 | TTTCCAGTCCCTGCATGTG | GAGGGGTTACCCAGAACCTT |
| 1672865 | AAAGGTTCTGGGTAACCCCT | CAGGCCTGAAAAAGCAAAGG |
| 821470 | CCTCTTTCTGTAATATCTGG | CTGGGCATTGCAGAACTGAA |
| 1549869 | CTGCAATAGTACACGTGGTG | AGATGTTGCAAAGGAGGTGC |
| 291040 | TACACTTGCCCAAAGTCCAC | TCTCTCTGTCAATCATGGGC |
| 289754 | ACTGCTTAGGTTGGCAAAGG | ATGCTTCCTTCCACAGGGAC |

[0265] TABLE 10

| | | |
|---|---|---|
| dbSNP rs# | Extend Primer | Term Mix |

| | | |
|---|---|---|
| 7500979 | TCAACCAATAGAAAAGGC | ACG |
| 2217332 | AACCTCTGGTCCTCTGGA | ACG |
| 8044804 | TAAGCCTTGGTATGATAC | ACG |
| 2270835 | GCCGTAAATTCCATTCTTC | ACG |
| 2133783 | CTGAACTTTACAGGTAACA | ACG |
| 247609 | AAACTATGTATCAGACAAAAGCAC | ACG |
| 952440 | CCTGGAAGGCAGCTGTGG | ACG |
| 881598 | CAGCCTGGGTGACAGAGC | ACT |
| 2291955 | GACTTTTCTAGGAAAGACTTA | ACG |
| 2518054 | TACCGGCACAAACAGTC | ACG |
| 866038 | CCCATCTCAAAAACAAAAAC | ACT |
| 1436425 | GGTGTGTGGCCCATGAT | ACG |
| 173537 | CATCACACCTGTCTGCCATC | ACT |
| 247611 | CTCCATGATTGGAGACTGACA | ACT |
| 166017 | CTACTGGCAGGGAACAT | ACT |
| 173538 | TTACAGGCGTAAGCCAC | ACG |
| 193694 | CTTAAAATCTACTCCCATACAT | ACT |
| 7205692 | CAAAAGAGTTAGGGGAG | ACG |
| 8048746 | CATGCCAAAATCTCGCC | ACG |
| 247618 | TTGGGGCCCCATGTAAA | ACG |
| 183130 | CTTCTGTGCAGGAGAAT | ACG |
| 6499863 | TTGAGGAGCAGTGGTCA | ACG |
| 4783961 | GGGTCCTGCCCTAGTCC | ACG |
| 3816117 | GAGGGAGATGGGCTGAG | ACG |
| 711752 | CAATGCAGCTAGGACCTTCT | ACG |
| 708272 | CTGGCTCAGATCTGAACCCTAACT | ACG |
| 1864163 | GGCTGTTGGAGAGGTTGATA | ACG |
| 4369653 | CAGGTGCTTTTACAAACAA | ACG |
| 1864165 | GTCCACCATGGCCCTCC | ACG |
| 891141 | CTGGGAAGTTTGCAGGG | ACT |
| 891143 | AGTGTGTCCACGGCTCC | ACG |
| 7205804 | CCTGTGCATCCATGGAG | ACG |
| 5885 | CATCTCTAACATCATGGC | ACG |
| 1532625 | TGAGGCATGCAGACAGAAAC | ACT |
| 1532624 | CAACGCCACACAGCTTGTGA | ACT |
| 289712 | CAGTGGATTGTGGCCCCC | ACG |
| 7499892 | AGCCCGTTGGCCTGAAC | ACG |
| 5883 | GTTCTCTGAGCGAGTCTT | ACG |
| 289714 | CATACCACATGCCATCTGGAT | ACG |
| 158480 | GGGACTATAGGTATGCAC | ACG |
| 289717 | TTCCAGCCCCCTACAAGTCACG | ACG |
| 4344729 | CAGAAGGGAAGAGGGAC | ACG |
| 289718 | TATGTGCAAGGAGAGAG | ACT |
| 289719 | CTGTGATGCCTCTCTCC | ACG |
| 2033254 | GGCAGGCCCCTGACCGGC | ACG |
| 4784744 | CCAAGAAACCACTGAAC | ACG |
| 291044 | AGTATTTAAAGGAGAGACACAC | ACG |
| 8053613 | GATGAGAAACTGAGGCC | ACG |
| 5881 | TTCCACAGGTTGTCGGC | ACT |
| 5880 | ATATCGTGACTACCGTCCAG | ACT |
| 7198026 | GAAATGTGGCCCCTTTC | ACG |
| 5882 | CAGAGCAGCTCCGAGTCC | ACT |
| 8045701 | CCTCTCCCTGCTGGTGG | ACG |
| 289741 | TGGGAGTCAGCCCAGCTC | ACT |
| 1801706 | CCTGGTGTCTCCTCCAGC | ACT |
| 289742 | GCCACAGAAGAAGGACTCC | ACT |
| 289743 | TGAGACAATCCCTTCCCCC | ACG |
| 289746 | TACCAAAATGGGACTGACCTC | ACG |
| 172337 | TTTGAGGATGGCCCCTGACACG | ACG |
| 289747 | TAGGCCAAAAAGTCTAAATTGC | ACT |
| 1566439 | CCTTAGAGAAACGGAAGGTG | ACT |
| 7205459 | ACTTTATTCCTGGATCAGA | ACG |
| 289749 | CAGGCAAGCTAATGCAA | ACT |
| 289751 | TGGAATTATGCGTTAAAGG | ACT |
| 8059220 | TGCATTCAGCTTCTCCA | ACG |
| 8058353 | CTACATCTGCCTCTCTATC | ACG |
| 289735 | GAGGGACAGAAGGGACC | ACT |
| 289737 | CTTACTTGTGTGGTTTAGAAT | ACT |
| 291042 | CCCATAACCAACACTCAGCT | ACG |
| 1875236 | GATTCTTGTCCTCTGAGAGC | ACG |
| 821466 | GAGGACAGGAGTGGAGCC | ACT |
| 821465 | ACAGAGAAAATGTGGCA | ACT |
| 4275846 | GATATGGTTTCAAAAGCCT | ACG |
| 289707 | TGCCATTCTCTAGGCCCGTC | ACT |
| 821463 | TGGGACACTGAAACCAGGG | ACG |
| 289706 | ACCAAAGGGATTGACTT | ACG |
| 1167741 | GAACTCTGAGTTACATTCC | ACG |
| 2052880 | CTTCCCTGCCTATTTTATGTC | ACT |
| 1167742 | CTTATCCCCCAACTCACCTT | ACT |
| 1183256 | TCATCTGCCCCCAGTTT | ACT |
| 1651665 | AGGGGTTCCAGGTTAGACCCTT | ACT |
| 1651666 | AGGAAGCCTGTTCTCACTTTC | ACG |
| 4784751 | TCATGGGGAAGCCCTAA | ACG |
| 1651667 | CTTGTACACCTTGGACTTGAC | ACT |
| 8052091 | CAACAGCCAGCAGCCCC | ACG |
| 1684574 | GATGCAGGAAGCAGGGCC | ACT |
| 1684575 | CACCTGTCTGTGGACTGGA | ACT |
| 1672865 | GGGTAACCCCTCAGCCCAG | ACT |
| 821470 | TCTGGATCCCCAGTGCC | ACG |
| 1549669 | TAGTACACGTGGTGTAAGGG | ACT |
| 291040 | CCAAAGTCCACCAGCCTCTACT | ACT |
| 289754 | CAAAGGATTTTAACTTCCTCTAG | ACG |

[0266] Genetic Analysis

[0267] Allelotyping results are shown for female cases and controls in Table 11. The allele frequency for the A2 allele is noted in the fifth and sixth columns for control pools and case pools, respectively, where “AF” is allele frequency. Some SNPs do not have an allele frequency disclosed because of failed assays.

TABLE 11

| | Position in | | | | | | | Low BMD |
|---|---|---|---|---|---|---|---|---|
| dbSNP | SEQ ID | Chromosome | A1/A2 | | | | | Associated |
| rs# | NO: 1 | Position | Allele | High AF | Low AF | p-Value | OR | Allele |
| 7500979 | 205 | 56743155 | G/A | G = 0.71 | G = 0.72 | 0.6029 | 1.07 | G |
| | | | | A = 0.29 | A = 0.28 | | | |
| 2217332 | 1595 | 56744545 | G/A | G = 0.85 | G = 0.84 | 0.5390 | 0.90 | A |
| | | | | A = 0.15 | A = 0.16 | | | |
| 8044804 | 2650 | 56745600 | C/T | C = 0.47 | C = | | | |
| | | | | T = 0.53 | T = | | | |
| 2270835 | 5496 | 56748446 | C/T | C = 0.00 | C = 0.00 | | | |
| | | | | T = 1.00 | T = 1.00 | | | |
| 2133783 | 5782 | 56748732 | G/A | G = 0.41 | G = 0.44 | 0.3412 | 1.14 | G |
| | | | | A = 0.59 | A = 0.56 | | | |
| 247609 | 5908 | 56748858 | C/T | C = 0.70 | C = 0.70 | 0.8844 | 1.02 | C |
| | | | | T = 0.30 | T = 0.30 | | | |
| 952440 | 7552 | 56750502 | G/A | G = 0.31 | G = 0.30 | 0.8410 | 0.97 | A |
| | | | | A = 0.69 | A = 0.70 | | | |
| 881598 | 9191 | 56752141 | T/C | T = 0.23 | T = 0.25 | 0.4703 | 1.11 | T |
| | | | | C = 0.77 | C = 0.75 | | | |
| 2291955 | 10127 | 56753077 | G/A | G = 0.00 | G = 0.00 | | | |
| | | | | A = 1.00 | A = 1.00 | | | |
| 2518054 | 10345 | 56753295 | G/A | G = 0.87 | G = 0.91 | 0.0835 | 1.47 | G |
| | | | | A = 0.13 | A = 0.09 | | | |
| 866038 | 10399 | 56753349 | T/C | T = 0.49 | T = 0.51 | 0.5835 | 1.07 | T |
| | | | | C = 0.51 | C = 0.49 | | | |
| 1436425 | 12028 | 56754978 | G/A | G = 0.39 | G = 0.38 | 0.7660 | 0.96 | A |
| | | | | A = 0.61 | A = 0.62 | | | |
| 173537 | 13355 | 56756305 | A/G | A = 0.80 | A = 0.81 | 0.8011 | 1.04 | A |
| | | | | G = 0.20 | G = 0.19 | | | |
| 247611 | 13687 | 56756637 | A/G | A = 0.38 | A = 0.39 | 0.7529 | 1.04 | A |
| | | | | G = 0.62 | G = 0.61 | | | |
| 166017 | 14328 | 56757278 | T/C | T = 0.29 | T = 0.43 | 0.00001 | 1.80 | T |
| | | | | C = 0.71 | C = 0.57 | | | |
| 173538 | 14746 | 56757696 | C/T | C = 0.68 | C = 0.67 | 0.5702 | 0.93 | T |
| | | | | T = 0.32 | T = 0.33 | | | |
| 193694 | 14996 | 56757946 | T/C | T = 0.14 | T = 0.24 | 0.0015 | 2.02 | T |
| | | | | C = 0.86 | C = 0.76 | | | |
| 7205692 | 19361 | 56762311 | G/A | G = 0.01 | G = 0.01 | | | |
| | | | | A = 0.99 | A = 0.99 | | | |
| 8048746 | 21775 | 56764725 | G/A | G = 0.00 | G = 0.00 | | | |
| | | | | A = 1.00 | A = 1.00 | | | |
| 247618 | 23250 | 56766200 | G/A | G = 0.28 | G = 0.29 | 0.5339 | 1.08 | G |
| | | | | A = 0.72 | A = 0.71 | | | |
| 183130 | 23810 | 56766760 | C/T | C = 0.64 | C = 0.59 | 0.0720 | 0.80 | T |
| | | | | T = 0.36 | T = 0.41 | | | |
| 6499863 | 24464 | 56767414 | G/A | G = 0.83 | G = 0.84 | 0.5810 | 1.09 | G |
| | | | | A = 0.17 | A = 0.16 | | | |
| 4783961 | 27341 | 56770291 | G/A | G = 0.48 | G = 0.46 | 0.3803 | 0.90 | A |
| | | | | A = 0.52 | A = 0.54 | | | |
| 3816117 | 28605 | 56771555 | C/T | C = 0.56 | C = 0.55 | 0.8019 | 0.97 | T |
| | | | | T = 0.44 | T = 0.45 | | | |
| 711752 | 28658 | 56771608 | G/A | G = 0.59 | G = 0.58 | 0.6887 | 0.95 | A |
| | | | | A = 0.41 | A = 0.42 | | | |
| 708272 | 28735 | 56771685 | C/T | C = 0.62 | C = 0.62 | 0.9629 | 1.01 | C |
| | | | | T = 0.38 | T = 0.38 | | | |
| 1864163 | 29680 | 56772630 | G/A | G = 0.74 | G = 0.74 | 0.9938 | 1.00 | G |
| | | | | A = 0.26 | A = 0.26 | | | |
| 4369653 | 29998 | 56772948 | G/A | G = 0.37 | G = 0.37 | 0.8163 | 0.97 | G |
| | | | | A = 0.63 | A = 0.63 | | | |
| 1864165 | 32521 | 56775471 | C/T | C = 1.00 | C = 1.00 | | | |
| | | | | T = 0.00 | T = 0.00 | | | |
| 891141 | 36170 | 56779120 | T/G | T = 1.00 | T = 1.00 | | | |
| | | | | G = 0.00 | G = 0.00 | | | |
| 891143 | 36427 | 56779377 | C/T | C = 1.00 | C = 1.00 | | | |
| | | | | T = 0.00 | T = 0.00 | | | |
| 7205804 | 37336 | 56780286 | G/A | G = 0.72 | G = 0.78 | 0.0212 | 1.41 | G |
| | | | | A = 0.28 | A = 0.22 | | | |
| 5885 | 37718 | 56780668 | C/T | C = 1.00 | C = 1.00 | | | |
| | | | | T = 0.00 | T = 0.00 | | | |
| 1532625 | 37748 | 56780698 | A/G | A = 0.60 | A = 0.61 | 0.6329 | 1.06 | A |
| | | | | G = 0.40 | G = 0.39 | | | |
| 1532624 | 37926 | 56780876 | T/G | T = 0.64 | T = 0.64 | 0.9807 | 1.00 | T |
| | | | | G = 0.36 | G = 0.36 | | | |
| 289712 | 38752 | 56781702 | G/A | G = 0.66 | G = 0.67 | 0.6644 | 1.06 | G |
| | | | | A = 0.34 | A = 0.33 | | | |
| 7499892 | 39037 | 56781987 | C/T | C = 0.88 | C = 0.88 | 0.9632 | 1.01 | C |
| | | | | T = 0.12 | T = 0.12 | | | |
| 5883 | 39800 | 56782750 | C/T | C = 0.95 | C = 0.96 | 0.8994 | 1.04 | C |
| | | | | T = 0.05 | T = 0.04 | | | |
| 289714 | 39898 | 56782848 | C/T | C = 0.19 | C = 0.23 | 0.0972 | 1.28 | C |
| | | | | T = 0.81 | T = 0.77 | | | |
| 158480 | 40674 | 56783624 | C/T | C = 0.59 | C = 0.56 | 0.3315 | 0.86 | T |
| | | | | T = 0.41 | T = 0.44 | | | |
| 289717 | 41835 | 56784785 | C/T | C = 0.67 | C = 0.72 | 0.1148 | 1.25 | C |
| | | | | T = 0.33 | T = 0.28 | | | |
| 4344729 | 42325 | 56785275 | C/T | C = 1.00 | C = 1.00 | | | |
| | | | | T = 0.00 | T = 0.00 | | | |
| 289718 | 42379 | 56785329 | A/G | A = | A = 0.20 | | | |
| | | | | G = | G = 0.80 | | | |
| 289719 | 42388 | 56785338 | G/A | G = | G = 0.39 | | | |
| | | | | A = | A = 0.61 | | | |
| 2033254 | 42432 | 56785382 | C/T | C = 0.34 | C = 0.38 | 0.1947 | 1.17 | C |
| | | | | T = 0.66 | T = 0.62 | | | |
| 4784744 | 43632 | 56786582 | G/A | G = 0.63 | G = 0.64 | 0.5113 | 1.08 | G |
| | | | | A = 0.37 | A = 0.36 | | | |
| 291044 | 43899 | 56786849 | C/T | C = 0.65 | C = 0.65 | 0.9666 | 1.01 | C |
| | | | | T = 0.35 | T = 0.35 | | | |
| 8053613 | 44273 | 56787223 | C/T | C = 1.00 | C = 1.00 | | | |
| | | | | T = 0.00 | T = 0.00 | | | |
| 5881 | 44459 | 56787409 | A/G | A = 0.00 | A = 0.00 | | | |
| | | | | G = 1.00 | G = 1.00 | | | |
| 5880 | 47538 | 56790488 | C/G | C = 0.09 | C = 0.09 | 0.9339 | 1.02 | C |
| | | | | G = 0.91 | G = 0.91 | | | |
| 7198026 | 47692 | 56790642 | C/T | C = 0.00 | C = 0.00 | | | C |
| | | | | T = 1.00 | T = 1.00 | | | |
| 5882 | 48539 | 56791489 | A/G | A = 0.76 | A = 0.80 | 0.0958 | 1.27 | A |
| | | | | G = 0.24 | G = 0.20 | | | |
| 8045701 | 48749 | 56791699 | C/T | C = 0.00 | C = 0.00 | | | |
| | | | | T = 1.00 | T = 1.00 | | | |
| 289741 | 49921 | 56792871 | A/G | A = 0.85 | A = 0.86 | 0.5974 | 1.09 | A |
| | | | | G = 0.15 | G = 0.14 | | | |
| 1801706 | 50109 | 56793059 | A/G | A = 0.31 | A = 0.23 | 0.0025 | 0.67 | G |
| | | | | G = 0.69 | G = 0.77 | | | |
| 289742 | 50209 | 56793159 | C/G | C = 0.91 | C = 0.92 | 0.6298 | 1.12 | C |
| | | | | G = 0.09 | G = 0.08 | | | |
| 289743 | 50243 | 56793193 | C/T | C = 0.27 | C = 0.24 | 0.1869 | 0.84 | T |
| | | | | T = 0.73 | T = 0.76 | | | |
| 289746 | 52652 | 56795602 | G/A | G = 0.72 | G = 0.72 | 0.8916 | 0.98 | G |
| | | | | A = 0.28 | A = 0.28 | | | |
| 172337 | 55195 | 56798145 | C/T | C = 0.94 | C = 0.91 | 0.0886 | 0.67 | T |
| | | | | T = 0.06 | T = 0.09 | | | |
| 289747 | 56385 | 56799335 | A/G | A = 0.49 | A = 0.54 | 0.0981 | 1.22 | A |
| | | | | G = 0.51 | G = 0.46 | | | |
| 1566439 | 57109 | 56800059 | A/G | A = 0.66 | A = 0.65 | 0.8578 | 0.98 | G |
| | | | | G = 0.34 | G = 0.35 | | | |
| 7205459 | 57618 | 56800568 | C/T | C = 0.16 | C = 0.10 | 0.0035 | 0.59 | T |
| | | | | T = 0.84 | T = 0.90 | | | |
| 289749 | 58741 | 56801691 | T/C | T = | T = 0.42 | | | |
| | | | | C = | C = 0.58 | | | |
| 289751 | 59222 | 56802172 | T/C | T = 0.98 | T = 0.94 | | | |
| | | | | C = 0.02 | C = 0.06 | | | |
| 8059220 | 60771 | 56803721 | C/T | C = 1.00 | C = 1.00 | | | |
| | | | | T = 0.00 | T = 0.00 | | | |
| 8058353 | 60962 | 56803912 | G/A | G = 0.98 | G = 0.95 | | | |
| | | | | A = 0.02 | A = 0.05 | | | |
| 289735 | 62009 | 56804959 | A/G | A = | A = 0.39 | | | |
| | | | | G = | G = 0.61 | | | |
| 289737 | 64589 | 56807539 | T/G | T = | T = 0.28 | | | |
| | | | | G = | G = 0.72 | | | |
| 291042 | 66054 | 56809004 | G/A | G = 0.80 | G = 0.82 | 0.4548 | 1.12 | G |
| | | | | A = 0.20 | A = 0.18 | | | |
| 1875236 | 66143 | 56809093 | C/T | C = 0.91 | C = 0.90 | 0.3106 | 0.80 | T |
| | | | | T = 0.09 | T = 0.10 | | | |
| 821466 | 67822 | 56810772 | A/G | A = 0.77 | A = 0.76 | 0.6743 | 0.94 | G |
| | | | | G = 0.23 | G = 0.24 | | | |
| 821465 | 68805 | 56811755 | C/G | C = 0.93 | C = 0.87 | 0.0041 | 0.54 | G |
| | | | | G = 0.07 | G = 0.13 | | | |
| 4275846 | 70075 | 56813025 | C/T | C = 1.00 | C = 1.00 | | | |
| | | | | T = 0.00 | T = 0.00 | | | |
| 289707 | 70350 | 56813300 | A/G | A = 0.44 | A = 0.46 | 0.6117 | 1.07 | A |
| | | | | G = 0.56 | G = 0.54 | | | |
| 821463 | 71214 | 56814164 | G/A | G = 0.38 | G = 0.41 | 0.4281 | 1.10 | G |
| | | | | A = 0.62 | A = 0.59 | | | |
| 289706 | 79549 | 56822499 | C/T | C = 0.00 | C = 0.00 | | | |
| | | | | T = 1.00 | T = 1.00 | | | |
| 1167741 | 82760 | 56825710 | C/T | C = 0.45 | C = 0.46 | 0.7635 | 1.04 | C |
| | | | | T = 0.55 | T = 0.54 | | | |
| 2052880 | 86463 | 56829413 | A/C | A = 0.67 | A = 0.68 | 0.8378 | 1.03 | A |
| | | | | C = 0.33 | C = 0.32 | | | |
| 1167742 | 86533 | 56829483 | C/G | C = 0.70 | C = 0.69 | 0.7322 | 0.96 | G |
| | | | | G = 0.30 | G = 0.31 | | | |
| 1183256 | 87019 | 56829969 | A/G | A = 1.00 | A = 1.00 | | | |
| | | | | G = 0.00 | G = 0.00 | | | |
| 1651665 | 88910 | 56831860 | A/C | A = 0.30 | A = 0.35 | 0.1423 | 1.24 | A |
| | | | | C = 0.70 | C = 0.65 | | | |
| 1651666 | 88955 | 56831905 | C/T | C = 0.71 | C = 0.67 | 0.1294 | 0.81 | T |
| | | | | T = 0.29 | T = 0.33 | | | |
| 4784751 | 89021 | 56831971 | C/T | C = 0.70 | C = 0.73 | 0.1971 | 1.18 | C |
| | | | | T = 0.30 | T = 0.27 | | | |
| 1651667 | 89056 | 56832006 | A/G | A = 0.44 | A = 0.47 | 0.2902 | 1.13 | A |
| | | | | G = 0.56 | G = 0.53 | | | |
| 8052091 | 89863 | 56832813 | G/A | G = 1.00 | G = 1.00 | | | |
| | | | | A = 0.00 | A = 0.00 | | | |
| 1684574 | 89879 | 56832829 | T/C | T = 0.01 | T = | | | |
| | | | | C = 0.99 | C = | | | |
| 1684575 | 90066 | 56833016 | T/G | T = 0.65 | T = 0.67 | 0.3473 | 1.12 | T |
| | | | | G = 0.35 | G = 0.33 | | | |
| 1672865 | 90101 | 56833051 | A/G | A = 0.49 | A = 0.50 | 0.6959 | 1.05 | A |
| | | | | G = 0.51 | G = 0.50 | | | |
| 821470 | 91029 | 56833979 | G/A | G = 0.37 | G = 0.38 | 0.8340 | 1.03 | G |
| | | | | A = 0.63 | A = 0.62 | | | |
| 1549669 | 91434 | 56834384 | T/G | T = 0.51 | T = 0.50 | 0.9075 | 0.99 | G |
| | | | | G = 0.49 | G = 0.50 | | | |
| 291040 | 93636 | 56836586 | T/C | T = 0.76 | T = 0.74 | 0.4056 | 0.89 | C |
| | | | | C = 0.24 | C = 0.26 | | | |
| 289754 | 98003 | 56840953 | C/T | C = 0.70 | C = 0.69 | 0.6508 | 0.94 | T |
| | | | | T = 0.30 | T = 0.31 | | | |

[0268] Allelotyping results were considered particularly significant with a calculated p-value of less than or equal to 0.05 for allelotype results. These values are indicated in bold. The allelotyping p-values were plotted in FIG. 1. The position of each SNP on the chromosome is presented on the x-axis. The y-axis gives the negative logarithm (base 10) of the p-value comparing the estimated allele in the case group to that of the control group. The minor allele frequency of the control group for each SNP designated by an X or other symbol on the graphs in FIG. 1 can be determined by consulting Table 11. For example, the left-most X on the left graph is at position 56743155. By proceeding down the table from top to bottom and across the graphs from left to right the allele frequency associated with each symbol shown can be determined.

[0269] To aid the interpretation, multiple lines have been added to the graph. The broken horizontal lines are drawn at two common significance levels, 0.05 and 0.01. The vertical broken lines are drawn very 20 kb to assist in the interpretation of distances between SNPs. Two other lines are drawn to expose linear trends in the association of SNPs to the disease. The light gray line (or generally bottom-most curve) is a nonlinear smoother through the data points on the graph using a local polynomial regression method (W. S. Cleveland, E. Grosse and W. M. Shyu (1992) Local regression models. Chapter 8 of Statistical Models in S eds J. M. Chambers and T. J. Hastie, Wadsworth & Brooks/Cole). The black line provides a local test for excess statistical significance to identify regions of association. This was created by use of a 10 kb sliding window with 1 kb step sizes. Within each window, a chi-square goodness of fit test was applied to compare the proportion of SNPs that were significant at a test wise level of 0.01, to the proportion that would be expected by chance alone (0.05 for the methods used here). Resulting p-values that were less than 10⁻⁸ were truncated at that value.

[0270] Finally, the exons and introns of the genes in the covered region are plotted below each graph at the appropriate chromosomal positions. The gene boundary is indicated by the broken horizontal line. The exon positions are shown as thick, unbroken bars. An arrow is place at the 3′ end of each gene to show the direction of transcription.

### Example 4

### PROL4 Proximal SNPs

[0271] It has been discovered that a polymorphic variation (rs1047699) in a gene encoding PROL4 is associated with the occurrence of low BMD (see Examples 1 and 2). One hundred twenty-five additional allelic variants proximal to rs1047699 were identified and subsequently allelotyped in low BMD case and high BMD control sample sets as described in Examples 1 and 2. The polymorphic variants are set forth in Table 12. The chromosome position provided in column four of Table 12 is based on Genome “Build 34” of NCBI's GenBank.

TABLE 12

| | Position in | | | | | |
|---|---|---|---|---|---|---|
| | SEQ ID | | Chromosome | Alleles | | |
| dbSNP | NO: 2 | Chromosome | Position | (A1/A2) | genome_letter | deduced_iupac |
| 523051 | 229 | 12 | 10842129 | t/c | g | R |
| 693620 | 368 | 12 | 10842268 | t/c | a | R |
| 2588349 | 583 | 12 | 10842483 | g/a | g | R |
| 2588350 | 2424 | 12 | 10844324 | t/c | t | Y |
| 619381 | 3625 | 12 | 10845525 | c/t | c | Y |
| 3759252 | 3709 | 12 | 10845609 | c/a | g | K |
| 3759251 | 3750 | 12 | 10845650 | t/a | t | W |
| 2418107 | 4724 | 12 | 10846624 | g/c | g | S |
| 7303054 | 4781 | 12 | 10846681 | t/c | c | Y |
| 1838345 | 6161 | 12 | 10848061 | a/g | g | R |
| 620878 | 7097 | 12 | 10848997 | t/g | g | K |
| 2537817 | 8025 | 12 | 10849925 | t/c | t | Y |
| 1548803 | 8398 | 12 | 10850298 | c/t | c | Y |
| 667123 | 10144 | 12 | 10852044 | g/a | a | R |
| 1838346 | 10384 | 12 | 10852284 | a/g | g | R |
| 2159903 | 11116 | 12 | 10853016 | a/g | g | R |
| 3944035 | 11132 | 12 | 10853032 | a/g | g | R |
| 3741845 | 11482 | 12 | 10853382 | t/c | a | R |
| 2110096 | 14544 | 12 | 10856444 | c/t | c | Y |
| 759055 | 15688 | 12 | 10857588 | t/a | t | W |
| 589377 | 17311 | 12 | 10859211 | g/c | g | S |
| 7960194 | 17831 | 12 | 10859731 | g/t | t | K |
| 7978242 | 20012 | 12 | 10861912 | a/g | g | R |
| 601051 | 21997 | 12 | 10863897 | g/a | g | R |
| 4262797 | 22861 | 12 | 10864761 | a/g | a | R |
| 2215714 | 23470 | 12 | 10865370 | a/g | g | R |
| 1373434 | 23515 | 12 | 10865415 | g/a | g | R |
| 2215715 | 23863 | 12 | 10865763 | g/a | g | R |
| 612456 | 24108 | 12 | 10866008 | c/a | c | M |
| 612808 | 24138 | 12 | 10866038 | t/c | c | Y |
| 689118 | 26469 | 12 | 10868369 | t/c | t | Y |
| 597468 | 27769 | 12 | 10869669 | a/g | g | R |
| 592864 | 29683 | 12 | 10871583 | t/c | t | Y |
| 640372 | 30491 | 12 | 10872391 | a/c | c | M |
| 7966559 | 30745 | 12 | 10872645 | a/t | a | W |
| 654834 | 31429 | 12 | 10873329 | t/c | t | Y |
| 4763216 | 31779 | 12 | 10873679 | c/g | c | S |
| 668521 | 32194 | 12 | 10874094 | a/c | c | M |
| 669503 | 32441 | 12 | 10874341 | t/c | c | Y |
| 3906864 | 32454 | 12 | 10874354 | t/c | g | R |
| 3906863 | 32459 | 12 | 10874359 | c/t | a | R |
| 7957888 | 35151 | 12 | 10877051 | a/t | t | W |
| 9300230 | 35362 | 12 | 10877262 | a/t | t | W |
| 7306214 | 35630 | 12 | 10877530 | g/c | g | S |
| 763839 | 36930 | 12 | 10878830 | g/c | g | S |
| 2418105 | 37490 | 12 | 10879390 | g/a | g | R |
| 666841 | 38432 | 12 | 10880332 | c/t | c | Y |
| 3851578 | 38688 | 12 | 10880588 | a/g | g | R |
| 7138797 | 39524 | 12 | 10881424 | t/c | c | Y |
| 7295252 | 41580 | 12 | 10883480 | a/c | a | M |
| 2418106 | 42531 | 12 | 10884431 | t/c | t | Y |
| 7299578 | 42665 | 12 | 10884565 | a/g | a | R |
| 621112 | 43038 | 12 | 10884938 | a/g | a | R |
| 3863320 | 44183 | 12 | 10886083 | g/a | g | R |
| 1373432 | 46271 | 12 | 10888171 | a/t | t | W |
| 1047699 | 49075 | 12 | 10890975 | c/t | t | Y |
| 1063193 | 49147 | 12 | 10891047 | c/t | c | Y |
| 2232959 | 49180 | 12 | 10891080 | c/g | g | S |
| 2227296 | 50301 | 12 | 10892201 | a/g | a | R |
| 1548804 | 50773 | 12 | 10892673 | g/a | g | R |
| 2232958 | 51243 | 12 | 10893143 | g/a | c | Y |
| 2232957 | 51530 | 12 | 10893430 | t/c | a | R |
| 2232956 | 52107 | 12 | 10894007 | a/g | c | Y |
| 1972571 | 52821 | 12 | 10894721 | a/g | a | R |
| 3759250 | 53341 | 12 | 10895241 | t/c | a | R |
| 3759249 | 53376 | 12 | 10895276 | c/g | g | S |
| 1541525 | 54047 | 12 | 10895947 | c/t | t | Y |
| 2098248 | 54392 | 12 | 10896292 | t/c | t | Y |
| 2900550 | 54482 | 12 | 10896382 | t/a | a | W |
| 7302130 | 55468 | 12 | 10897368 | c/a | a | M |
| 4763583 | 56990 | 12 | 10898890 | a/g | a | R |
| 4360778 | 57712 | 12 | 10899612 | a/t | a | W |
| 1607695 | 59667 | 12 | 10901567 | c/t | a | R |
| 1607694 | 59684 | 12 | 10901584 | t/c | g | R |
| 2192139 | 62043 | 12 | 10903943 | a/c | a | M |
| 7978300 | 63293 | 12 | 10905193 | t/c | t | Y |
| 7397871 | 63485 | 12 | 10905385 | g/t | g | K |
| 4763217 | 63778 | 12 | 10905678 | c/t | t | Y |
| 2159900 | 64222 | 12 | 10906122 | a/g | a | R |
| 10772370 | 65722 | 12 | 10907622 | a/g | a | R |
| 7398682 | 66315 | 12 | 10908215 | c/t | c | Y |
| 2900551 | 66829 | 12 | 10908729 | a/g | a | R |
| 2900552 | 66966 | 12 | 10908866 | c/t | c | Y |
| 2418214 | 66971 | 12 | 10908871 | a/c | c | M |
| 2418215 | 67013 | 12 | 10908913 | t/c | c | Y |
| 965243 | 70375 | 12 | 10912275 | a/t | t | W |
| 1117548 | 74118 | 12 | 10916018 | t/a | t | W |
| 1520225 | 75224 | 12 | 10917124 | c/t | c | Y |
| 1520226 | 75236 | 12 | 10917136 | t/c | t | Y |
| 1520227 | 75246 | 12 | 10917146 | g/c | g | S |
| 971919 | 75812 | 12 | 10917712 | c/a | a | M |
| 2159901 | 78968 | 12 | 10920868 | c/t | t | Y |
| 2159902 | 78998 | 12 | 10920898 | t/c | t | Y |
| 2110099 | 79328 | 12 | 10921228 | a/c | c | M |
| 7314847 | 80922 | 12 | 10922822 | t/c | t | Y |
| 7296003 | 81055 | 12 | 10922955 | t/c | c | Y |
| 4281556 | 81412 | 12 | 10923312 | g/a | a | R |
| 4763219 | 81785 | 12 | 10923685 | a/g | g | R |
| 3851579 | 82079 | 12 | 10923979 | g/a | a | R |
| 3851580 | 82087 | 12 | 10923987 | g/a | g | R |
| 1049119 | 82958 | 12 | 10924858 | a/g | c | Y |
| 2298866 | 83351 | 12 | 10925251 | t/g | a | M |
| 2298865 | 83442 | 12 | 10925342 | c/t | a | R |
| 2298864 | 83472 | 12 | 10925372 | a/c | t | K |
| 2298863 | 83966 | 12 | 10925866 | a/g | t | Y |
| 3180393 | 84414 | 12 | 10926314 | t/c | t | Y |
| 2070837 | 86563 | 12 | 10928463 | c/g | c | S |
| 7956204 | 86788 | 12 | 10928688 | g/a | g | R |
| 2418216 | 86796 | 12 | 10928696 | t/g | t | K |
| 3741844 | 87634 | 12 | 10929534 | g/a | c | Y |
| 4262798 | 88530 | 12 | 10930430 | g/a | a | R |
| 2418217 | 89202 | 12 | 10931102 | a/g | a | R |
| 2418218 | 89632 | 12 | 10931532 | t/c | t | Y |
| 7137492 | 89697 | 12 | 10931597 | t/c | t | Y |
| 2110100 | 89723 | 12 | 10931623 | g/a | g | R |
| 1013312 | 91063 | 12 | 10932963 | c/g | c | S |
| 4579993 | 91335 | 12 | 10933235 | c/g | g | S |
| 1013313 | 91504 | 12 | 10933404 | t/c | t | Y |
| 7397106 | 91619 | 12 | 10933519 | c/t | t | Y |
| 2215716 | 93715 | 12 | 10935615 | a/g | g | R |
| 2192140 | 93945 | 12 | 10935845 | t/c | c | Y |
| 4763589 | 94235 | 12 | 10936135 | t/c | t | Y |
| 1468697 | 95851 | 12 | 10937751 | t/c | c | Y |
| 2070837 | 130860 | 12 | 10972760 | c/g | c | S |
| 3180393 | 132815 | 12 | 10974715 | t/c | a | R |
| 2298865 | 133778 | 12 | 10975678 | c/t | t | Y |

[0272] Assay for Verifying and Allelotyping SNPs

[0273] The methods used to verify and allelotype the proximal SNPs of Table 12 are the same methods described in Examples 1 and 2 herein. The primers and probes used in these assays are provided in Table 13 and Table 14, respectively.

TABLE 13

| | | |
|---|---|---|
| dbSNP | Forward | Reverse |
| rs# | PCR primer | PCR primer |

| | | |
|---|---|---|
| 523051 | CTCTGCTCAGAGCATAGATG | TTCCATGCATTTTAACCCCG |
| 693820 | GTAGGTCAATAAAAGAGGAGG | TTAGGCCGAGATTTTCAGAG |
| 2588349 | GTTCAAGAGTTTGATGTCAAG | CAGGGCATCTAAATTGAACG |
| 2588350 | TGTATCTGGGACATACCATC | GTTAGTACAGGGTTGATCAC |
| 619381 | AAAGCATAGTTTCTCTTCAG | GCATCTCTAAAGGTGATTTGG |
| 3759252 | GCTGTGATTTTTGGTGAGTC | TATTGTTCCCCAGTATTAGG |
| 3759251 | TTGTCCTTTCTCATTGCCAC | ATTAGAGCTATGGACTCACC |
| 2418107 | AGGTAAATGGGCATACAGTG | TGAAGACTGGAGCTATCTTC |
| 7303054 | AGGGAATTGGCCCAATTTGC | CCATTTACCTACTCAGCAGG |
| 1838345 | CCCAGGTTCAAGTGATTCTC | AATTAGCCAGGCATGGTTGC |
| 620878 | CCAGACCAAACGTTTCAATAA | AAGAAGAAACGAATGTTTAC |
| 2537817 | GTCAGAATGCTGACATGTAG | GGGGAAAAATGAGAATAGAC |
| 1548803 | ATGGGACAATTGCAAACAGG | ACTGAAATGTTCCATGTGAG |
| 667123 | TAAATACAAGAAGCCCTAGG | AGGGAAAGTACAACTTAGCC |
| 1838346 | GTTAGAAGGCTAGAGAGAAC | TTCATGAGTACTCTAGCTGG |
| 2159903 | AGTCAGGATACTCTTTAGGG | GGGAAGCTTTTCTGAAGATG |
| 3944035 | GGGTCTCTATGGAACAAAAG | TGAGGGAAGCTTTTCTGAAG |
| 3741845 | TGCTTGGTGTGTCTAACTAG | CAAACAGTTAACCCTGAACC |
| 2110096 | ATCAAGAACAGGATACTGCG | GGGTAGGAGATAAAGTCAGC |
| 759055 | CCCCTATCTTTTTGTTGGATG | GCTCTGTTTTCATGAGGTTC |
| 589377 | TTCACTGTTCAGATTGCTGG | ACTCCAGTTGTAGGTAGAAG |
| 7960194 | TGCTATCTTCCATGGAAGAA | TTTTTTTCCCTGTATGCCTC |
| 7978242 | GACGCTAAGCATCATTAGTC | TAGCCATTCTAGTGGATGTG |
| 601051 | TTTTTACGTCTGTGTGAACC | CACAGAAACCGAAAACCAAC |
| 4262797 | ATTTTAGTGCACCCATCACC | GTCTTTAGAGACTCAAAAGGG |
| 2215714 | GAGTTAAACATCAGTCGTTGT | TTATTATATAACGTAGGAA |
| 1373434 | CGTTTAAGATGATAGATCTTC | CTACGCAATAGGCTATTTTC |
| 2215715 | ACATGGATGGAAAGGAAGAC | TATGAGCGAGAATATGTGGC |
| 612456 | TATCAACAAGCCAAGATCCC | CTTTAGCCTTTTGTTGGACG |
| 612808 | GGCTGAGTGTTAAGTATTCC | AAGGCAAACCCTTAATAGGC |
| 689118 | GAAATGTTCTGTCTTCAGGC | AACGTTTCTGTGAGTGCAAG |
| 597468 | TACATGTTGAGATCCCAGAC | TGCATACATTGCGAAGATTC |
| 592864 | AAATTGTGTTTCTTGTAAGC | AATGAACTAAATACTCCAAG |
| 640372 | ATCTGAAACTCTTTGAGCGC | TCCAAAATGTTCCAATGAGC |
| 7966559 | CCTAATTCTTTTCTATCGGTG | GAAGCTAGAAAGCTAAGAGTG |
| 654834 | CTGTCCTTTTTCTGGCTTTC | CAAACAAAATAGAGTCCAGCG |
| 4763216 | TTGTAACCATAGAAAGCAGG | TCCCTCTATTTTTCTACTAC |
| 668521 | TGCTGCTGATGTAACTGCAG | GTGCAATAGTAACTGGGCTC |
| 669503 | GTAATCCACTCATTCAGATC | TACCTAGAGGAAATAAGTGG |
| 3906864 | TTTCTAACATCCACCTTCTG | GGTGTGAATAAGTTGTAATCC |
| 3906863 | CAGGACTGACCTCTAAAATAG | ACATCCACTTTCTGTAGATC |
| 7957888 | ACCTTAACAAAGTTCTGTGG | GAGCCACGAAAAAAAAAATG |
| 9300230 | CCAGACAAGCTAAAATACAG | CAAATACACACAGACACATC |
| 7306214 | CTATAGCACAGTAGGGTGAC | TCTTCGTGTTGGGCACATTC |
| 763839 | TATTCATGTAACACCGAAGG | GGAACAGCAAACTGAAACAG |
| 2418105 | GGAGGCATTCCATTCTTTTC | GTGTATCCAAAGCTTTAGTG |
| 666841 | TAATCCCCAAGAGAGAGGAC | AACTAACACAGATGGCCACC |
| 3851578 | GTGTGTATTTGCCCTTCTGC | GGCATGTGATAGGAATGTGC |
| 7138797 | GTTCTGAAGTACATGTGCAG | TTAATACCTAGGTGATGGGC |
| 7295252 | CAAGTTTACAATCACAGCTG | GGTAAATGTATTTGACAGTTG |
| 2418106 | CAGCCCAGAATGGCTTTGAA | ACTAACGATGGGTGATGAGC |
| 7299578 | ATCTGCCCCATGATCCAATC | CCCCTGAAAACCTCATGTTG |
| 621112 | TATGTTGGGTCACAAACCTG | AGCAAGGCGTACAAAACAAC |
| 3863320 | GTTGCTCACAATACTGGAGG | TGTCTTCAGCAGAACTCATC |
| 1373432 | TAAGGCAGAGGGCTACTTAC | GCATTTTACAAGACTTAAATC |
| | | G |
| 1047699 | ATTACCAGAGTGGTTGCTCC | ATTTCCTTCTGTCAGCCTGC |
| 1063193 | AGGCTGACAGAAGGAAATCG | TCAGCAGAGACCACCAAAAC |
| 2232959 | TCAGCAGAGACCACCAAAAC | GGTGGTCGTTGCTGATTTTG |
| 2227296 | TGAGAAGAAGACACTGAAGG | ATCCCAATGATCCTCAATCC |
| 1548804 | CCCATTTTTCTTCCAATCAC | GGAGCAACCAGGAGTAAATA |
| 2232958 | TCTTCTCAACCTCCTTCCTC | ATGACTCTTCTAGGGCCTCA |
| 2232957 | TTTATAAACATGAGCAGAAC | CGCATTCAACTTTATGAGAGG |
| 2232956 | GCCAATTTTGCCTTACTAACC | CTAGCATTAACCAGAGATAC |
| 1972571 | ATCACCAGCTGCCACTTTTC | CCTCAAATTATCACCAGCCC |
| 3759250 | TTCTGCCTAGGTGGCTTATG | AATCATGTCTGCATGGCACG |
| 3759249 | CACACAGTGAATCATGTCTG | ATGGTAGACCATCAGGTAGG |
| 1541525 | TATCTGTAGACGTGCATCCC | CTGACACCTGTCCTCATAAG |
| 2098248 | GGGAGAATCATGGCTTGA | GTACTGCCCTTAGCAAATCC |
| 2900550 | TCAACAGTCTCCAGCTGATC | ACTCTGGCTGTTGTAAGGAG |
| 7302130 | TACACCTGTGAGCACTGACA | CCTTTTCTCAAGGTGTGTGC |
| 4763583 | AATGGTTTAGCACCATCCCC | GGGAGGTGACACACACTTTT |
| 4360778 | AGGCTGCAAGTTTTCCAAAC | GCCTAAGCAAAGAAATGAGC |
| 1607695 | TTCTTCTCACTGACCTATTC | ATCAAACAGAAACGCTGGAG |
| 1607694 | ATCAAACAGAAACGCTGGAG | CTCTTTTTTTGTCTGACTGGG |
| 2192139 | GGTCTTTTGTTTGCTAGGAC | GTAACCTGCCAAGATTGAAC |
| 7978300 | TCTGAGTCTTTTGTGGTACC | TGCAGATTCAATGCAATCCC |
| 7397871 | AGGAGCTGAAACGATGGTTC | CAAAATGGCATGACACTGGC |
| 4763217 | ACATTGTGTCTGTGCTTCTC | GCAGTCTCTTATTGTCTGAG |
| 2159900 | TTACAACAAGTGCTCAAGGG | GTGTCTTCTCTAACAGTGAG |
| 10772370 | GAATGACCATATGATCCAGC | TAGGTATCCCTTTGATGTCC |
| 7398682 | GACAGATACCCTAACTTGATC | GCAGTAAAGCTATCAATCCTG |
| 2900551 | GTACCTCAACACAAAAAGGC | GAGGAAATCTTTCACCTTTCC |
| 2900552 | GCTAGATATACTAGGCAAGAG | TGTCATCCGAAAAGATGAAC |
| 2418214 | TGTCATCCGAAAAGATGAAC | GCTAGATATACTAGGCAAGAG |
| 2418215 | CTATTCTGCAACTTTACCAG | TAGAAGGAAGTCAATTGTTC |
| 965243 | GGCTGTGTAGGTTTGTCCTC | TTCATCCCATTCCATCCAGC |
| 1117548 | GTGGTACATCACATTAACAG | TTCCTTCTTTGTGTAGTTCG |
| 1520225 | CGTGACTCTCTGTACAGCAT | CAGCACTAGGCTGTGAAAAG |
| 1520226 | TAGGGTAAAATGTGCACAGC | GCATTGTTAGTGGTTGCTCC |
| 1520227 | TAGGGTAAAATGTGCACAGC | GCATTGTTAGTGGTTGCTCC |
| 971919 | TTAGTGACCTTCATAGAACC | CAGGCATTCTTAGAAGACAG |
| 2159901 | CATATCTACTTGTGAACTGC | GAAGGTAAAACCACTGATGC |
| 2159902 | CCCCTATAAGAGCAAAATAC | GAACTTTTCAGAAAGCATCAG |
| 2110099 | ATTCCTTCTCAACCCACATC | ACATTACAGGAAGGCCTTTC |
| 7314847 | CCTCTGCATAGATACAGTAG | CTCTTATACACCCTGATTGG |
| 7296003 | TGGTTACTTAGGTTGATGCC | CTACTGTATCTATGCAGAGG |
| 4281556 | GGCCTTAGGGTTTCCATAAC | AAGCCTTGGAAGAGTGAGTG |
| 4763219 | AGGAGAATCGCTTGAACCTG | TGGAGTCTCATTCTGTCACC |
| 3851579 | AGGCTTTCAAACAAAATAGG | TTACGGGTCTGATAAGAAAG |
| 3851580 | AGGCTTTCAAACAAAATAGG | TTACGGGTCTGATAAGAAAG |
| 1049119 | GATAACAGTGTTTCAAATGC | GAAATTGCAAGCTGATTGTT |
| 2298866 | TAACCAATCCCTGTCACTGG | ACAAAGATGGGCACTGCAAC |
| 2298865 | CCTGAGTTCATTTAGATCTC | ACGGAACAACCAAACAATAG |
| 2298864 | CCAGTAAACACTGAAGAGATC | GATTTGTGTCTTACTCACTGG |
| 2298863 | AGCTCTTGAAGGCAATTCTG | TATGTCCTCATTGTCAACCC |
| 3180393 | AACAAGGTCCACCACCTCCT | TTGTGGCCTTCCTTGAGGAG |
| 2070837 | ACACACCCACACAAACTCAC | TGGAAAGACTGCTATTCTGC |
| 7956204 | TTTGGACAATTCTTGTAGCC | TGTGAGATGTGTGAGGACAG |
| 2418216 | CCCAGGCACACATATATGAG | GCCTGAGTGTAGTGAGATTC |
| 3741844 | GCTGATTGCTCTGTGATACC | AAGTGCAGCTGGTGATTCTG |
| 4262798 | TCTAGGTACCCAAGCTCCTG | AAGAGCTGAAAGGGACACTG |
| 2418217 | GCCTGGAACACTAAAGATGG | CTCACTGACTCTCAGAGAAG |
| 2418218 | AAATTAGTCAGTCATGGTGG | TTCAAGCAATTCTCCTGCCT |
| 7137492 | TCCTCATTTACTACAGTGAC | CCCATCTCTACTAAAAATAC |
| 2110100 | CTGGAATTACAAAGAGAAGAG | CCCATCTCTACTAAAAATAC |
| 1013312 | ATTGTGTTTGCCCACTTTCC | GTGGAACATCAAGAATGAAG |
| 4579993 | ATTTGTGCTCCTTTCTACTG | AGCAGAAAGAAGGAAATGAC |
| 1013313 | TTCCAAACACAGCAAAGAGC | TTGGTTGTATTCTGGTTGGG |
| 7397106 | TCTGAAACTCAGAATGCATG | ATACTCTAAACAATACAGGG |
| 2215716 | GTACTAGCAGTAGTCAGAGG | GACACCACTACTTGCACATG |
| 2192140 | CCTTGGGATTTAGAAATAGGG | GTAAGCAAATATCTCTGGAG |
| 4763589 | TTGGCAACTGTGTAACCTTG | TCAAACATACTGTTTGCTCAC |
| 1468697 | GAACACAATCGCAAGTTTAAG | GTTCTTCAAAATCTGCTTCC |
| 2070837 | ACACACCCACACAAACTCAC | TGGAAAGACTGCTATTCTGC |
| 3180393 | AACAAGGTCCACCACCTCCT | TTGTGGCCTTCCTTGAGGAG |
| 2298865 | CCTGAGTTCATTTAGATCTC | ACGGAACAACCAAACAATAG |

[0274] TABLE 14

| | | |
|---|---|---|
| dbSNP | Extend | Term |
| rs# | Primer | Mix |

| | | |
|---|---|---|
| 523051 | TCAGAGCATAGATGATGGCAA | ACT |
| 693620 | AGAGGAGGAAACCTTAATTTCT | ACT |
| 2588349 | AGAGTTTGATGTCAAGGAAATG | ACG |
| 2588350 | TACCATCAAAAGCACATCATTC | ACT |
| 619381 | GAATTTTCTTCCTTTTAGAATAGA | ACG |
| 3759252 | TGGTGAGTCCATAGCTCTAAT | CGT |
| 3759251 | CCAGCTACTTTATGCCAGAG | CGT |
| 2418107 | TGGCCAGGCCAAGGATCG | ACT |
| 7303054 | CAGCCTAAATTAACCGTATGTG | ACT |
| 1838345 | CCTGCCTGAGCCTGCCAA | ACT |
| 620878 | TTCAATAATATTATAGTGAGGATG | ACT |
| 2537817 | GACATGTAGAAAAATTGCCTGC | ACT |
| 1548803 | TTGCAAACAGGTTAAAGAGAGT | ACG |
| 667123 | AAGCCCTAGGGTATTGTGATT | ACG |
| 1838346 | AAGGCTAGAGAGAACATTCCA | ACT |
| 2159903 | AGGGGTCTCTATGGAACAAAA | ACT |
| 3944035 | AACAAAAGGCTTTCTTCTTCTAA | ACT |
| 3741845 | CAAAGGATAAAGGGAACCATC | ACT |
| 2110096 | CAGGATACTGCGATACTGTC | ACG |
| 759055 | GTAATCTTGTTTGTTGTATTTTTC | CGT |
| 589377 | CTGGTGTGTAGAAACACAACA | ACT |
| 7960194 | GCCCAGGGCTCAGGGAAG | CGT |
| 7978242 | GCAAACCAAAACCACAGTCAC | ACT |
| 601051 | CCCGCTTATAAGCAAGAGCA | ACG |
| 4262797 | TTATCCCTATCCTCCCTTCC | ACT |
| 2215714 | GCATCACTCTTTCTACGCAATA | ACT |
| 1373434 | TGTTTCAAAACATCACTATGTAC | ACG |
| 2215715 | GGAAAGGAAGACATTATGGTAC | ACG |
| 612456 | CCAAGATCCCTGAAAGGCAAA | CGT |
| 612808 | CTACTTTAGCCTTTTGTTGGAC | ACT |
| 689118 | GCTTCATACACACACACACAT | ACT |
| 597468 | CCCAGACTGTGTCATTCTTC | ACT |
| 592864 | GTGTTTCTTGTAAGCAGTATAC | ACT |
| 640372 | AAACTCTTTGAGCGCTGACAT | ACT |
| 7966559 | TCTATCGGTGATTTCTGCTGT | CGT |
| 654834 | CACAATTGGCTTTTAAAACTCC | ACT |
| 4763216 | CCATAGAAAGCAGGACTGGTT | ACT |
| 668521 | AAATTAGTCTAGAACTTGTGGAA | ACT |
| 669503 | CCACTCATTCAGATCTACAGAA | ACT |
| 3906864 | ACATCCACCTTCTGTAGATCT | ACT |
| 3906863 | GTGTGAATAAGTTGTAATCCAC | ACG |
| 7957888 | TGTGGAAATATTTGAAGACTCTT | CGT |
| 9300230 | ATACAGAGAAGTAGAGGACAAA | CGT |
| 7306214 | CACAGTAGGGTGACTACAATTA | ACT |
| 763839 | TAACACCGAAGGTTCCTCAG | ACT |
| 2418105 | CATTCTTTTCCAGTGTCAATCAA | ACG |
| 666841 | GGACTTGGCAGCATTATTTATTA | ACG |
| 3851578 | CAGCTAATTGTGCTCCCTCA | ACT |
| 7138797 | AAGTACATGTGCAGAATGTGC | ACT |
| 7295252 | ATCACAGCTGATAATGTCATAAT | ACT |
| 2418106 | GAATGGCTTTGAATATGACCCA | ACT |
| 7299578 | CAGGTGCTATCACAACATCG | ACT |
| 621112 | CACAAACCTGCCATTTTACTTT | ACT |
| 3863320 | AATACTGGAGGCTGGAAGAC | ACG |
| 1373432 | CAGAGGGCTACTTACAAGAATT | CGT |
| 1047699 | TCTTGCTGGTCTGTCCCTC | ACG |
| 1063193 | AGTTGACGGTGTCCTCGT | ACG |
| 2232959 | ATCACCGCCATCCTCCCC | ACT |
| 2227296 | GAAATTCTAGTGGAAAAAG | ACT |
| 1548804 | AAAATTTCAATATGTTGCAGGCAG | ACG |
| 2232958 | CCTCCCCTCCTGCTCTTC | ACG |
| 2232957 | GGACCTCACCACCTGAAAG | ACT |
| 2232956 | TGCCTTACTAACCTCCAGG | ACT |
| 1972571 | CTGCCACTTTTCATTACAGGC | ACT |
| 3759250 | TAGGTGGCTTATGGTAGACC | ACT |
| 3759249 | TCTGCATGGCACGCCCCT | ACT |
| 1541525 | CCCTCTGTGGTCTGTGCTAA | ACG |
| 2098248 | GAATCATGGCTTGACTCAGG | ACT |
| 2900550 | GCCCCTCACCACATCCCA | CGT |
| 7302130 | CCCACCCAGCAGGAAGAC | CGT |
| 4763583 | CCTGCGTACTATTCTTATGAC | ACT |
| 4360778 | TTTTACACTCTGCTTCCCTTTT | CGT |
| 1607695 | TTCTCACTGACCTATTCTATTTT | ACG |
| 1607694 | AGCTTCAAAAATAGAATAGGTCA | ACT |
| 2192139 | CTTTGATCTCATCACTTGTTATT | ACT |
| 7978300 | TTCTGTTTCTGTGAAGAATGTC | ACT |
| 7397871 | GCCAGGCTCACAGTCCAAA | CGT |
| 4763217 | TTGGACGTAGGACAAAGAACT | ACG |
| 2159900 | GCTCAAGGGAGTTCTACATCT | ACT |
| 10772370 | GACCATATGATCCAGCAATTTC | ACT |
| 7398682 | GCTTATAACAAAATATCATGTGTC | ACG |
| 2900551 | GCCATATATGACAAACCCACA | ACT |
| 2900552 | ATATACTAGGCAAGAGATAGAAA | ACG |
| 2418214 | CTTCCTTCTATTCAATTTCAATTT | ACT |
| 2418215 | CTATAAATAAGATCATGTCATCC | ACT |
| 965243 | CAGACCCATCAGAGAAGTAC | CGT |
| 1117548 | CCAAATAAGCATATGAATAGATG | CGT |
| 1520225 | CAGCATTGTTAGTGGTTGCTC | ACG |
| 1520226 | GCTGTGAAAAGCTATGTATGC | ACT |
| 1520227 | CAGCACTAGGCTGTGAAAAG | ACT |
| 971919 | ATAAGATAGGTCTGTTGGAAAG | CGT |
| 2159901 | TGATTTCTTCAGCCATTATCCA | ACG |
| 2159902 | TTAAGCTTGCATGAAAGAAGGT | ACT |
| 2110099 | TTATGTCAGCAGAAAAACAGAAA | ACT |
| 7314847 | GAGTTTTAGTTCTTTGAGAAATC | ACT |
| 7296003 | GGTTGATGCCATATCTTTGCT | ACT |
| 4281556 | GGTTTCCATAACAAGAATAACAAA | ACG |
| 4763219 | CCGATATCTTGCCACTGCAG | ACT |
| 3851579 | CAAAATAGGAACACACTGAGTAT | ACG |
| 3851580 | CTTTCAAACAAAATAGGAACACA | ACG |
| 1049119 | TGGCATCATGCTCTAACTTCA | ACT |
| 2298866 | CCTGTCACTGGATATTAAGGC | ACT |
| 2298865 | CATTTAGATCTCTTCAGTGTTTA | ACG |
| 2298864 | CTGAAGAGATCTAAATGAACTCA | ACT |
| 2298863 | CAATTCTGATTTTGAGAATCACT | ACT |
| 3180393 | GCCACAAGGACCACCCCA | ACT |
| 2070837 | CCACACAAACTCACATACACA | ACT |
| 7956204 | AGGCTGCCAGCACCTTTCT | ACG |
| 2418216 | GCACACATATATGAGAGAAAGG | ACT |
| 3741844 | GTGATACCTAGAAATTCCCTG | ACG |
| 4262798 | CGTCTCCCTTTCACCCACC | ACG |
| 2418217 | TGCCAGGAAAGATGAACATTG | ACT |
| 2418218 | CAGTCATGGTGGCGAGGG | ACT |
| 7137492 | GCCATGTGACTTAATTTCTTTAG | ACT |
| 2110100 | TCCTCATTTACTACAGTGACC | ACG |
| 1013312 | GCCCACTTTCCCCCTTTCT | ACT |
| 4579993 | ACTGTTATTTCTGGTTTCTGGT | ACT |
| 1013313 | ACAGCAAAGAGCATAAACCTAC | ACT |
| 7397106 | CTCAGAATGCATGAATAGTACA | ACG |
| 2215716 | CGTACTATTTCTTCAAGCTTCA | ACT |
| 2192140 | TAGGGTATCCCTCTTGGTCA | ACT |
| 4763589 | CTGTGTAACCTTGATCTTGGG | ACT |
| 1468697 | CAATCGCAAGTTTAAGGTAACA | ACT |
| 2070837 | CCACACAAACTCACATACACA | ACT |
| 3180393 | GCCACAAGGACCACCCCA | ACT |
| 2298865 | CATTTAGATCTCTTCAGTGTTTA | ACG |

[0275] Genetic Assay

[0276] Allelotyping results are shown for female cases and controls in Table 15. The allele frequency for A2 allele is noted in the fifth and sixth columns for control pools and case pools, respectively, where “AF” is allele frequency. Some SNPs do not have an allele frequency disclosed because of failed assays.

TABLE 15
Female Allelotyping Results

| | Position in | | | | | | | Low BMD |
|---|---|---|---|---|---|---|---|---|
| dbSNP | SEQ ID | Chromosome | A1/A2 | Controls (high | Cases (Low | | | Associated |
| rs# | NO: 2 | Position | Allele | BMD) AF | BMD) AF | p-Value | OR | Allele |
| 523051 | 229 | 10842129 | T/C | T = 0.00 | T = 0.00 | | | |
| | | | | C = 1.00 | C = 1.00 | | | |
| 693620 | 368 | 10842268 | T/C | T = 1.00 | T = 1.00 | | | |
| | | | | C = 0.00 | C = 0.00 | | | |
| 2588349 | 583 | 10842483 | G/A | G = 1.00 | G = 1.00 | | | |
| | | | | A = 0.00 | A = 0.00 | | | |
| 2588350 | 2424 | 10844324 | T/C | T = 0.34 | T = 0.28 | 0.0295 | 0.76 | C |
| | | | | C = 0.66 | C = 0.72 | | | |
| 619381 | 3625 | 10845525 | C/T | C = 0.86 | C = 0.91 | 0.0065 | 1.67 | C |
| | | | | T = 0.14 | T = 0.09 | | | |
| 3759252 | 3709 | 10845609 | C/A | C = 1.00 | C = 1.00 | | | |
| | | | | A = 0.00 | A = 0.00 | | | |
| 3759251 | 3750 | 10845650 | T/A | T = 0.01 | T = 0.01 | | | |
| | | | | A = 0.99 | A = 0.99 | | | |
| 2418107 | 4724 | 10846624 | G/C | G = 1.00 | G = 1.00 | | | |
| | | | | C = 0.00 | C = 0.00 | | | |
| 7303054 | 4781 | 10846681 | T/C | T = 0.00 | T = 0.00 | | | |
| | | | | C = 1.00 | C = 1.00 | | | |
| 1838345 | 6161 | 10848061 | A/G | A = | A = | | | |
| | | | | G = | G = | | | |
| 620878 | 7097 | 10848997 | T/G | T = 0.07 | T = 0.03 | 0.0098 | 0.37 | G |
| | | | | G = 0.93 | G = 0.97 | | | |
| 2537817 | 8025 | 10849925 | T/C | T = 0.19 | T = 0.16 | 0.4485 | 0.85 | C |
| | | | | C = 0.81 | C = 0.84 | | | |
| 1548803 | 8398 | 10850298 | C/T | C = 0.47 | C = 0.41 | 0.0564 | 0.78 | T |
| | | | | T = 0.53 | T = 0.59 | | | |
| 667123 | 10144 | 10852044 | G/A | G = 1.00 | G = 1.00 | | | |
| | | | | A = 0.00 | A = 0.00 | | | |
| 1838346 | 10384 | 10852284 | A/G | A = 0.76 | A = 0.80 | 0.1329 | 1.26 | A |
| | | | | G = 0.24 | G = 0.20 | | | |
| 2159903 | 11116 | 10853016 | A/G | A = 0.00 | A = 0.00 | | | |
| | | | | G = 1.00 | G = 1.00 | | | |
| 3944035 | 11132 | 10853032 | A/G | A = 0.00 | A = 0.00 | | | |
| | | | | G = 1.00 | G = 1.00 | | | |
| 3741845 | 11482 | 10853382 | T/C | T = 0.54 | T = 0.49 | 0.0877 | 0.81 | C |
| | | | | C = 0.46 | C = 0.51 | | | |
| 2110096 | 14544 | 10856444 | C/T | C = 1.00 | C = 1.00 | | | |
| | | | | T = 0.00 | T = 0.00 | | | |
| 759055 | 15688 | 10857588 | T/A | T = 0.45 | T = 0.37 | 0.0084 | 0.72 | A |
| | | | | A = 0.55 | A = 0.63 | | | |
| 589377 | 17311 | 10859211 | G/C | G = 0.01 | G = 0.00 | | | |
| | | | | C = 0.99 | C = 1.00 | | | |
| 7960194 | 17831 | 10859731 | G/T | G = 1.00 | G = 1.00 | | | |
| | | | | T = 0.00 | T = 0.00 | | | |
| 7978242 | 20012 | 10861912 | A/G | A = 0.62 | A = 0.68 | 0.0611 | 1.27 | A |
| | | | | G = 0.38 | G = 0.32 | | | |
| 601051 | 21997 | 10863897 | G/A | G = 0.01 | G = 0.00 | | | |
| | | | | A = 0.99 | A = 1.00 | | | |
| 4262797 | 22861 | 10864761 | A/G | A = 0.61 | A = 0.54 | 0.0391 | 0.76 | G |
| | | | | G = 0.39 | G = 0.46 | | | |
| 2215714 | 23470 | 10865370 | A/G | A = 0.00 | A = 0.00 | | | |
| | | | | G = 1.00 | G = 1.00 | | | |
| 1373434 | 23515 | 10865415 | G/A | G = 1.00 | G = 1.00 | | | |
| | | | | A = 0.00 | A = 0.00 | | | |
| 2215715 | 23863 | 10865763 | G/A | G = 1.00 | G = 1.00 | | | |
| | | | | A = 0.00 | A = 0.00 | | | |
| 612456 | 24108 | 10866008 | C/A | C = 0.03 | C = 0.02 | | | |
| | | | | A = 0.97 | A = 0.98 | | | |
| 612808 | 24138 | 10866038 | T/C | T = 0.20 | T = 0.11 | 0.0001 | 0.52 | C |
| | | | | C = 0.80 | C = 0.89 | | | |
| 689118 | 26469 | 10868369 | T/C | T = 0.68 | T = 0.71 | 0.3485 | 1.15 | T |
| | | | | C = 0.32 | C = 0.29 | | | |
| 597468 | 27769 | 10869669 | A/G | A = 0.99 | A = 1.00 | | | |
| | | | | G = 0.01 | G = 0.00 | | | |
| 592864 | 29683 | 10871583 | T/C | T = 0.10 | T = 0.11 | 0.9292 | 1.04 | T |
| | | | | C = 0.90 | C = 0.89 | | | |
| 640372 | 30491 | 10872391 | A/C | A = 0.96 | A = 0.96 | 0.6780 | 1.21 | A |
| | | | | C = 0.04 | C = 0.04 | | | |
| 7966559 | 30745 | 10872645 | A/T | A = 0.79 | A = | | | |
| | | | | T = 0.21 | T = | | | |
| 654834 | 31429 | 10873329 | T/C | T = 0.04 | T = 0.03 | 0.3922 | 0.74 | C |
| | | | | C = 0.96 | C = 0.97 | | | |
| 4763216 | 31779 | 10873679 | C/G | C = 0.50 | C = 0.45 | 0.0951 | 0.82 | G |
| | | | | G = 0.50 | G = 0.55 | | | |
| 668521 | 32194 | 10874094 | A/C | A = 0.98 | A = 0.99 | | | |
| | | | | C = 0.02 | C = 0.01 | | | |
| 669503 | 32441 | 10874341 | T/C | T = 0.96 | T = 0.96 | 0.4685 | 1.26 | T |
| | | | | C = 0.04 | C = 0.04 | | | |
| 3906864 | 32454 | 10874354 | T/C | T = 0.99 | T = 1.00 | | | |
| | | | | C = 0.01 | C = 0.00 | | | |
| 3906863 | 32459 | 10874359 | C/T | C = 0.34 | C = 0.41 | 0.0288 | 1.35 | C |
| | | | | T = 0.66 | T = 0.59 | | | |
| 7957888 | 35151 | 10877051 | A/T | A = 0.87 | A = 0.93 | 0.0155 | 2.12 | A |
| | | | | T = 0.13 | T = 0.07 | | | |
| 9300230 | 35362 | 10877262 | A/T | A = 1.00 | A = 1.00 | | | |
| | | | | T = 0.00 | T = 0.00 | | | |
| 7306214 | 35630 | 10877530 | G/C | G = 1.00 | G = 1.00 | | | |
| | | | | C = 0.00 | C = 0.00 | | | |
| 763839 | 36930 | 10878830 | G/C | G = 0.82 | G = 0.88 | 0.0047 | 1.61 | G |
| | | | | C = 0.18 | C = 0.12 | | | |
| 2418105 | 37490 | 10879390 | G/A | G = 0.21 | G = 0.16 | 0.0198 | 0.69 | A |
| | | | | A = 0.79 | A = 0.84 | | | |
| 666841 | 38432 | 10880332 | C/T | C = 0.89 | C = 0.93 | 0.0180 | 1.72 | C |
| | | | | T = 0.11 | T = 0.07 | | | |
| 3851578 | 38688 | 10880588 | A/G | A = 0.89 | A = 0.93 | 0.0243 | 1.67 | A |
| | | | | G = 0.11 | G = 0.07 | | | |
| 7138797 | 39524 | 10881424 | T/C | T = 0.97 | T = 0.97 | 0.9815 | 0.99 | T |
| | | | | C = 0.03 | C = 0.03 | | | |
| 7295252 | 41580 | 10883480 | A/C | A = 1.00 | A = 1.00 | | | |
| | | | | C = 0.00 | C = 0.00 | | | |
| 2418106 | 42531 | 10884431 | T/C | T = 0.35 | T = 0.30 | 0.1784 | 0.80 | C |
| | | | | C = 0.65 | C = 0.70 | | | |
| 7299578 | 42665 | 10884565 | A/G | A = 0.30 | A = 0.23 | 0.0036 | 0.67 | G |
| | | | | G = 0.70 | G = 0.77 | | | |
| 621112 | 43038 | 10884938 | A/G | A = 0.87 | A = 0.92 | 0.0086 | 1.69 | A |
| | | | | G = 0.13 | G = 0.08 | | | |
| 3863320 | 44183 | 10886083 | G/A | G = 0.52 | G = 0.49 | 0.2271 | 0.87 | A |
| | | | | A = 0.48 | A = 0.51 | | | |
| 1373432 | 46271 | 10888171 | A/T | A = 0.00 | A = 0.00 | | | |
| | | | | T = 1.00 | T = 1.00 | | | |
| 1047699 | 49075 | 10890975 | C/T | C = 0.79 | C = 0.85 | 0.0062 | 1.53 | C |
| | | | | T = 0.21 | T = 0.15 | | | |
| 1063193 | 49147 | 10891047 | C/T | C = 0.75 | C = | | | |
| | | | | T = 0.25 | T = | | | |
| 2232959 | 49180 | 10891080 | C/G | C = 1.00 | C = 1.00 | | | |
| | | | | G = 0.00 | G = 0.00 | | | |
| 2227296 | 50301 | 10892201 | A/G | A = 0.77 | A = 0.77 | 0.9934 | 1.00 | A |
| | | | | G = 0.23 | G = 0.23 | | | |
| 1548804 | 50773 | 10892673 | G/A | G = 0.24 | G = 0.15 | 0.0005 | 0.54 | A |
| | | | | A = 0.76 | A = 0.85 | | | |
| 2232958 | 51243 | 10893143 | G/A | G = 1.00 | G = 1.00 | | | |
| | | | | A = 0.00 | A = 0.00 | | | |
| 2232957 | 51530 | 10893430 | T/C | T = 1.00 | T = 1.00 | | | |
| | | | | C = 0.00 | C = 0.00 | | | |
| 2232956 | 52107 | 10894007 | A/G | A = 0.87 | A = 0.92 | 0.0170 | 1.64 | A |
| | | | | G = 0.13 | G = 0.08 | | | |
| 1972571 | 52821 | 10894721 | A/G | A = 0.13 | A = 0.13 | 0.8117 | 1.04 | A |
| | | | | G = 0.87 | G = 0.87 | | | |
| 3759250 | 53341 | 10895241 | T/C | T = 0.99 | T = 1.00 | | | |
| | | | | C = 0.01 | C = 0.00 | | | |
| 3759249 | 53376 | 10895276 | C/G | C = 1.00 | C = 1.00 | | | |
| | | | | G = 0.00 | G = 0.00 | | | |
| 1541525 | 54047 | 10895947 | C/T | C = 0.00 | C = 0.00 | | | |
| | | | | T = 1.00 | T = 1.00 | | | |
| 2098248 | 54392 | 10896292 | T/C | T = 0.00 | T = 0.00 | | | |
| | | | | C = 1.00 | C = 1.00 | | | |
| 2900550 | 54482 | 10896382 | T/A | T = 0.89 | T = 0.93 | 0.0535 | 1.59 | T |
| | | | | A = 0.11 | A = 0.07 | | | |
| 7302130 | 55468 | 10897368 | C/A | C = 0.36 | C = 0.36 | 0.9550 | 1.01 | C |
| | | | | A = 0.64 | A = 0.64 | | | |
| 4763583 | 56990 | 10898890 | A/G | A = | A = | | | |
| | | | | G = | G = | | | |
| 4360778 | 57712 | 10899612 | A/T | A = 0.00 | A = 0.01 | | | |
| | | | | T = 1.00 | T = 0.99 | | | |
| 1607695 | 59667 | 10901567 | C/T | C = 0.00 | C = 0.01 | | | |
| | | | | T = 1.00 | T = 0.99 | | | |
| 1607694 | 59684 | 10901584 | T/C | T = 0.81 | T = 0.83 | 0.3469 | 1.17 | T |
| | | | | C = 0.19 | C = 0.17 | | | |
| 2192139 | 62043 | 10903943 | A/C | A = 0.30 | A = 0.28 | 0.4555 | 0.89 | C |
| | | | | C = 0.70 | C = 0.72 | | | |
| 7978300 | 63293 | 10905193 | T/C | T = 0.36 | T = | | | |
| | | | | C = 0.64 | C = | | | |
| 7397871 | 63485 | 10905385 | G/T | G = 0.00 | G = 0.00 | | | |
| | | | | T = 1.00 | T = 1.00 | | | |
| 4763217 | 63778 | 10905678 | C/T | C = 0.89 | C = 0.90 | 0.8698 | 1.05 | C |
| | | | | T = 0.11 | T = 0.10 | | | |
| 2159900 | 64222 | 10906122 | A/G | A = 0.02 | A = 0.02 | | | |
| | | | | G = 0.98 | G = 0.98 | | | |
| 10772370 | 65722 | 10907622 | A/G | A = 0.31 | A = 0.27 | 0.1478 | 0.82 | G |
| | | | | G = 0.69 | G = 0.73 | | | |
| 7398682 | 66315 | 10908215 | C/T | C = 1.00 | C = 1.00 | | | |
| | | | | T = 0.00 | T = 0.00 | | | |
| 2900551 | 66829 | 10908729 | A/G | A = 0.00 | A = 0.01 | | | |
| | | | | G = 1.00 | G = 0.99 | | | |
| 2900552 | 66966 | 10908866 | C/T | C = 0.61 | C = 0.59 | 0.5150 | 0.92 | T |
| | | | | T = 0.39 | T = 0.41 | | | |
| 2418214 | 66971 | 10908871 | A/C | A = 0.51 | A = 0.57 | 0.0565 | 1.27 | A |
| | | | | C = 0.49 | C = 0.43 | | | |
| 2418215 | 67013 | 10908913 | T/C | T = 0.82 | T = 0.86 | 0.1232 | 1.29 | T |
| | | | | C = 0.18 | C = 0.14 | | | |
| 965243 | 70375 | 10912275 | A/T | A = 0.82 | A = 0.85 | 0.1637 | 1.25 | A |
| | | | | T = 0.18 | T = 0.15 | | | |
| 1117548 | 74118 | 10916018 | T/A | T = 1.00 | T = 0.99 | | | |
| | | | | A = 0.00 | A = 0.01 | | | |
| 1520225 | 75224 | 10917124 | C/T | C = 0.27 | C = 0.22 | 0.0956 | 0.79 | T |
| | | | | T = 0.73 | T = 0.78 | | | |
| 1520226 | 75236 | 10917136 | T/C | T = 0.99 | T = 0.98 | | | |
| | | | | C = 0.01 | C = 0.02 | | | |
| 1520227 | 75246 | 10917146 | G/C | G = 0.91 | G = 0.82 | 0.00001 | 0.46 | C |
| | | | | C = 0.09 | C = 0.18 | | | |
| 971919 | 75812 | 10917712 | C/A | C = 0.00 | C = 0.00 | | | |
| | | | | A = 1.00 | A = 1.00 | | | |
| 2159901 | 78968 | 10920868 | C/T | C = 0.99 | C = 0.99 | | | |
| | | | | T = 0.01 | T = 0.01 | | | |
| 2159902 | 78998 | 10920898 | T/C | T = 0.54 | T = 0.51 | 0.3599 | 0.90 | C |
| | | | | C = 0.46 | C = 0.49 | | | |
| 2110099 | 79328 | 10921228 | A/C | A = 0.60 | A = 0.63 | 0.4080 | 1.11 | A |
| | | | | C = 0.40 | C = 0.37 | | | |
| 7314847 | 80922 | 10922822 | T/C | T = 0.51 | T = 0.49 | 0.6059 | 0.94 | C |
| | | | | C = 0.49 | C = 0.51 | | | |
| 7296003 | 81055 | 10922955 | T/C | T = 0.63 | T = 0.65 | 0.4799 | 1.09 | T |
| | | | | C = 0.37 | C = 0.35 | | | |
| 4281556 | 81412 | 10923312 | G/A | G = 0.85 | G = 0.87 | 0.5327 | 1.17 | G |
| | | | | A = 0.15 | A = 0.13 | | | |
| 4763219 | 81785 | 10923685 | A/G | A = | A = | | | |
| | | | | G = | G = | | | |
| 3851579 | 82079 | 10923979 | G/A | G = | G = 0.34 | | | |
| | | | | A = | A = 0.66 | | | |
| 3851580 | 82087 | 10923987 | G/A | G = 0.56 | G = 0.54 | 0.5618 | 0.93 | A |
| | | | | A = 0.44 | A = 0.46 | | | |
| 1049119 | 82958 | 10924858 | A/G | A = 0.00 | A = 0.00 | | | |
| | | | | G = 1.00 | G = 1.00 | | | |
| 2298866 | 83351 | 10925251 | T/G | T = 0.72 | T = 0.69 | 0.3240 | 0.87 | G |
| | | | | G = 0.28 | G = 0.31 | | | |
| 2298865 | 83442 | 10925342 | C/T | C = 0.95 | C = 0.97 | 0.1804 | 1.67 | C |
| | | | | T = 0.05 | T = 0.03 | | | |
| 2298864 | 83472 | 10925372 | A/C | A = 0.36 | A = 0.34 | 0.5936 | 0.93 | C |
| | | | | C = 0.64 | C = 0.66 | | | |
| 2298863 | 83966 | 10925866 | A/G | A = 1.00 | A = 1.00 | | | |
| | | | | G = 0.00 | G = 0.00 | | | |
| 3180393 | 84414 | 10926314 | T/C | T = 1.00 | T = 1.00 | | | |
| | | | | C = 0.00 | C = 0.00 | | | |
| 2070837 | 86563 | 10928463 | C/G | C = 0.43 | C = 0.43 | 0.9403 | 0.99 | C |
| | | | | G = 0.57 | G = 0.57 | | | |
| 7956204 | 86788 | 10928688 | G/A | G = 0.86 | G = | | | |
| | | | | A = 0.14 | A = | | | |
| 2418216 | 86796 | 10928696 | T/G | T = 1.00 | T = 1.00 | | | |
| | | | | G = 0.00 | G = 0.00 | | | |
| 3741844 | 87634 | 10929534 | G/A | G = 0.50 | G = 0.48 | 0.3827 | 0.90 | A |
| | | | | A = 0.50 | A = 0.52 | | | |
| 4262798 | 88530 | 10930430 | G/A | G = 0.60 | G = 0.62 | 0.4130 | 1.10 | G |
| | | | | A = 0.40 | A = 0.38 | | | |
| 2418217 | 89202 | 10931102 | A/G | A = 0.53 | A = 0.52 | 0.6562 | 0.95 | G |
| | | | | G = 0.47 | G = 0.48 | | | |
| 2418218 | 89632 | 10931532 | T/C | T = | T = | | | |
| | | | | C = | C = | | | |
| 7137492 | 89697 | 10931597 | T/C | T = 0.75 | T = 0.76 | 0.7043 | 1.07 | T |
| | | | | C = 0.25 | C = 0.24 | | | |
| 2110100 | 89723 | 10931623 | G/A | G = 0.53 | G = 0.52 | 0.5403 | 0.93 | A |
| | | | | A = 0.47 | A = 0.48 | | | |
| 1013312 | 91063 | 10932963 | C/G | C = 0.29 | C = 0.26 | 0.1928 | 0.84 | G |
| | | | | G = 0.71 | G = 0.74 | | | |
| 4579993 | 91335 | 10933235 | C/G | C = 0.00 | C = 0.00 | | | |
| | | | | G = 1.00 | G = 1.00 | | | |
| 1013313 | 91504 | 10933404 | T/C | T = 0.61 | T = 0.58 | 0.3893 | 0.90 | C |
| | | | | C = 0.39 | C = 0.42 | | | |
| 7397106 | 91619 | 10933519 | C/T | C = 0.02 | C = 0.04 | | | |
| | | | | T = 0.98 | T = 0.96 | | | |
| 2215716 | 93715 | 10935615 | A/G | A = 0.45 | A = 0.36 | 0.0372 | 0.69 | G |
| | | | | G = 0.55 | G = 0.64 | | | |
| 2192140 | 93945 | 10935845 | T/C | T = 0.00 | T = 0.00 | | | |
| | | | | C = 1.00 | C = 1.00 | | | |
| 4763589 | 94235 | 10936135 | T/C | T = 0.53 | T = 0.52 | 0.6806 | 0.95 | C |
| | | | | C = 0.47 | C = 0.48 | | | |
| 1468697 | 95851 | 10937751 | T/C | T = 0.02 | T = 0.01 | | | |
| | | | | C = 0.98 | C = 0.99 | | | |
| 2070837 | 130860 | 10972760 | C/G | C = 0.43 | C = 0.43 | 0.9403 | 0.99 | C |
| | | | | G = 0.57 | G = 0.57 | | | |
| 3180393 | 132815 | 10974715 | T/C | T = 1.00 | T = 1.00 | | | |
| | | | | C = 0.00 | C = 0.00 | | | |
| 2298865 | 133778 | 10975678 | C/T | C = 0.95 | C = 0.97 | 0.1804 | 1.67 | C |
| | | | | T = 0.05 | T = 0.03 | | | |

[0277] Allelotyping results were considered particularly significant with a calculated p-value of less than or equal to 0.05 for allelotype results. These values are indicated in bold. The allelotyping p-values were plotted in FIG. 2. The position of each SNP on the chromosome is presented on the x-axis. The y-axis gives the negative logarithm (base 10) of the p-value comparing the estimated allele in the case group to that of the control group. The minor allele frequency of the control group for each SNP designated by an X or other symbol on the graphs in FIG. 2 can be determined by consulting Table 15. For example, the left-most X on the left graph is at position 10842129. By proceeding down the Table from top to bottom and across the graphs from left to right the allele frequency associated with each symbol shown can be determined.

[0278] To aid the interpretation, multiple lines have been added to the graph. The broken horizontal lines are drawn at two common significance levels, 0.05 and 0.01. The vertical broken lines are drawn every 20 kb to assist in the interpretation of distances between SNPs. Two other lines are drawn to expose linear trends in the association of SNPs to the disease. The light gray line (or generally bottom-most curve) is a nonlinear smoother through the data points on the graph using a local polynomial regression method (W. S. Cleveland, E. Grosse and W. M. Shyu (1992) Local regression models. Chapter 8 of Statistical Models in S eds J. M. Chambers and T. J. Hastie, Wadsworth & Brooks/Cole.). The black line provides a local test for excess statistical significance to identify regions of association. This was created by use of a 10 kb sliding window with 1 kb step sizes. Within each window, a chi-square goodness of fit test was applied to compare the proportion of SNPs that were significant at a test wise level of 0.01, to the proportion that would be expected by chance alone (0.05 for the methods used here). Resulting p-values that were less than 10⁻⁸ were truncated at that value.

[0279] Finally, the exons and introns of the genes in the covered region are plotted below each graph at the appropriate chromosomal positions. The gene boundary is indicated by the broken horizontal line. The exon positions are shown as thick, unbroken bars. An arrow is place at the 3′ end of each gene to show the direction of transcription.

### Example 5

### GRID2 Proximal SNPs

[0280] It has been discovered that a polymorphic variation (rs1948017) in a gene encoding GRID2 is associated with the occurrence of low BMD (see Examples 1 and 2). One hundred five additional allelic variants proximal to rs1948017 were identified and subsequently allelotyped in low BMD case and high BMD control sample sets as described in Examples 1 and 2. The polymorphic variants are set forth in Table 16. The chromosome position provided in column four of Table 16 is based on Genome “Build 34” of NCBI's GenBank.

TABLE 16

| | Position in | | | | | |
|---|---|---|---|---|---|---|
| | SEQ ID | | Chromosome | | | |
| dbSNP | NO: 3 | Chromosome | Position | Alleles (A1/A2) | genome_letter | deduced_iupac |
| 1433661 | 206 | 4 | 94744306 | t/c | g | R |
| 1485009 | 243 | 4 | 94744343 | a/g | g | R |
| 7681947 | 2467 | 4 | 94746567 | t/c | t | Y |
| 1816432 | 3550 | 4 | 94747650 | a/g | t | Y |
| 1485018 | 4994 | 4 | 94749094 | c/g | g | S |
| 1485017 | 5167 | 4 | 94749267 | g/t | c | M |
| 7438397 | 5193 | 4 | 94749293 | c/t | c | Y |
| 6834311 | 5273 | 4 | 94749373 | g/a | g | R |
| 1368717 | 5733 | 4 | 94749833 | a/g | c | Y |
| 1017391 | 7817 | 4 | 94751917 | a/c | g | K |
| 2870701 | 7818 | 4 | 94751918 | t/a | a | W |
| 7679839 | 8612 | 4 | 94752712 | t/g | t | K |
| 1385404 | 9158 | 4 | 94753258 | a/g | a | R |
| 1368716 | 9285 | 4 | 94753385 | g/a | c | Y |
| 4693316 | 10680 | 4 | 94754780 | g/a | a | R |
| 1905707 | 11866 | 4 | 94755966 | t/c | c | Y |
| 1905708 | 11958 | 4 | 94756058 | a/g | a | R |
| 1905709 | 12044 | 4 | 94756144 | a/t | t | W |
| 3912442 | 12753 | 4 | 94756853 | g/t | t | K |
| 2082553 | 15585 | 4 | 94759685 | a/g | c | Y |
| 6831638 | 17299 | 4 | 94761399 | c/t | c | Y |
| 5860329 | 18816 | 4 | 94762916 | —/g | g | N |
| 2870702 | 24022 | 4 | 94768122 | c/t | t | Y |
| 2870703 | 24994 | 4 | 94769094 | c/t | t | Y |
| 1948016 | 26637 | 4 | 94770737 | g/t | t | K |
| 6835836 | 27635 | 4 | 94771735 | c/g | g | S |
| 1994253 | 28773 | 4 | 94772873 | t/c | t | Y |
| 1905710 | 29430 | 4 | 94773530 | a/t | a | W |
| 1485019 | 29876 | 4 | 94773976 | t/a | t | W |
| 978191 | 30364 | 4 | 94774464 | c/t | a | R |
| 1385405 | 31057 | 4 | 94775157 | c/a | t | K |
| 7694361 | 31782 | 4 | 94775882 | c/t | t | Y |
| 1905711 | 33400 | 4 | 94777500 | a/c | c | M |
| 1905734 | 35588 | 4 | 94779688 | a/c | t | K |
| 1485012 | 37663 | 4 | 94781763 | c/g | c | S |
| 1485013 | 37865 | 4 | 94781965 | t/c | c | Y |
| 4692981 | 38218 | 4 | 94782318 | a/t | a | W |
| 7670552 | 39375 | 4 | 94783475 | t/c | c | Y |
| 7670932 | 39559 | 4 | 94783659 | c/t | c | Y |
| 7688091 | 39833 | 4 | 94783933 | a/g | g | R |
| 7440540 | 40135 | 4 | 94784235 | a/g | g | R |
| 2171000 | 41698 | 4 | 94785798 | g/a | t | Y |
| 2870704 | 42249 | 4 | 94786349 | t/c | t | Y |
| 7655758 | 42571 | 4 | 94786671 | g/c | c | S |
| 7661436 | 42977 | 4 | 94787077 | g/a | g | R |
| 7662289 | 43548 | 4 | 94787648 | t/c | c | Y |
| 7667044 | 43631 | 4 | 94787731 | g/a | a | R |
| 7691929 | 43705 | 4 | 94787805 | t/c | t | Y |
| 5860330 | 43817 | 4 | 94787917 | tt/t— | t— | N |
| 901013 | 44374 | 4 | 94788474 | a/c | g | K |
| 901012 | 44464 | 4 | 94788564 | a/c | g | K |
| 901011 | 44788 | 4 | 94788888 | t/c | g | R |
| 1948018 | 48962 | 4 | 94793062 | a/g | c | Y |
| 2870705 | 48993 | 4 | 94793093 | t/g | t | K |
| 1948017 | 49110 | 4 | 94793210 | c/t | a | R |
| 1905733 | 49434 | 4 | 94793534 | c/t | a | R |
| 1385408 | 49523 | 4 | 94793623 | t/g | t | K |
| 1385409 | 49742 | 4 | 94793842 | c/g | c | S |
| 1385410 | 49907 | 4 | 94794007 | g/c | g | S |
| 1485026 | 50028 | 4 | 94794128 | g/c | g | S |
| 1485027 | 50089 | 4 | 94794189 | g/t | t | K |
| 2904483 | 51588 | 4 | 94795688 | c/a | a | M |
| 1385406 | 52899 | 4 | 94796999 | c/a | a | M |
| 1905732 | 54088 | 4 | 94798188 | a/c | t | K |
| 2046418 | 56538 | 4 | 94800638 | c/t | a | R |
| 2200377 | 59071 | 4 | 94803171 | t/c | g | R |
| 1905731 | 59110 | 4 | 94803210 | a/c | t | K |
| 1905730 | 59178 | 4 | 94803278 | a/g | c | Y |
| 975713 | 61087 | 4 | 94805187 | t/c | a | R |
| 6820985 | 61300 | 4 | 94805400 | c/g | c | S |
| 7670441 | 62171 | 4 | 94806271 | t/c | c | Y |
| 6810794 | 62783 | 4 | 94806883 | t/a | t | W |
| 7676623 | 62983 | 4 | 94807083 | t/c | c | Y |
| 1154861 | 63908 | 4 | 94808008 | c/t | t | Y |
| 1032125 | 64088 | 4 | 94808188 | g/t | g | K |
| 1485022 | 64941 | 4 | 94809041 | a/t | a | W |
| 1485024 | 65050 | 4 | 94809150 | a/g | g | R |
| 3913651 | 68953 | 4 | 94813053 | c/t | c | Y |
| 4693319 | 70093 | 4 | 94814193 | t/c | c | Y |
| 1872383 | 71308 | 4 | 94815408 | c/a | g | K |
| 2200376 | 73009 | 4 | 94817109 | t/a | t | W |
| 7668090 | 74002 | 4 | 94818102 | a/g | g | R |
| 7692930 | 74294 | 4 | 94818394 | t/c | t | Y |
| 967096 | 74879 | 4 | 94818979 | g/c | g | S |
| 6822249 | 76936 | 4 | 94821036 | g/t | t | K |
| 6532405 | 77195 | 4 | 94821295 | g/a | g | R |
| 1017897 | 77683 | 4 | 94821783 | t/c | c | Y |
| 7672674 | 78283 | 4 | 94822383 | t/c | t | Y |
| 7694568 | 78331 | 4 | 94822431 | c/t | c | Y |
| 2904484 | 79362 | 4 | 94823462 | g/c | c | S |
| 7340830 | 80357 | 4 | 94824457 | c/t | c | Y |
| 1485033 | 80653 | 4 | 94824753 | t/c | g | R |
| 2870706 | 80840 | 4 | 94824940 | a/g | g | R |
| 1905729 | 83203 | 4 | 94827303 | a/g | c | Y |
| 4693320 | 85405 | 4 | 94829505 | t/c | t | Y |
| 6848749 | 86441 | 4 | 94830541 | g/t | t | K |
| 6532406 | 86967 | 4 | 94831067 | g/a | g | R |
| 6532407 | 87121 | 4 | 94831221 | t/c | t | Y |
| 1905728 | 89617 | 4 | 94833717 | t/c | g | R |
| 6819866 | 90969 | 4 | 94835069 | t/a | a | W |
| 1905727 | 94249 | 4 | 94838349 | g/c | g | S |
| 7674069 | 95811 | 4 | 94839911 | t/g | t | K |
| 1905724 | 96690 | 4 | 94840790 | t/g | c | M |
| 1905723 | 96731 | 4 | 94840831 | a/g | c | Y |
| 1485020 | 97267 | 4 | 94841367 | c/g | c | S |
| 6814101 | 97414 | 4 | 94841514 | t/g | g | K |

[0281] Assay for Verifying and Allelotyping SNPs

[0282] the methods used to verify and allelotype the proximal SNPs of Table 16 are the same methods described in Examples 1 and 2 herein. The primers and probes used in these assays are provided in Table 17 and Table 18, respectively.

TABLE 17

| | | |
|---|---|---|
| DbSNP | | |
| rs# | Forward PCR primer | Reverse PCR primer |

| | | |
|---|---|---|
| 1433661 | CTCCCAAAGCCATGGGATTC | CAGGAATGCAATCTAAGGCC |
| 1485009 | CCTAACCCTCTTCTGGAAAA | GACCTATAAAGACAGGAATGC |
| 7681947 | ACCAGAACAGGACGAATTAG | CCCCAATGTTATGCATACTC |
| 1816432 | GTTCTAGCCTTACTGAGATAG | GCTTAAAGACCTTCAAACTAC |
| 1485018 | AAAGATCGCTTGAAACTGGG | TTGCTCTGTTGTCAAGGCTG |
| 1485017 | TGACCAGGCTGGTCTAAAAC | TAATCCCAGCAGTTTGGGAG |
| 7438397 | GAGATCTAGCAATCCTCCTG | GAAACCTAATTTTGAGCCTG |
| 6834311 | TCATTGTGTTACAGATGCTC | CCAGGCTCAAAATTAGGTTTC |
| 1368717 | AAATCTGCAGACAAGGACAG | AGCAACCTGGTTTTAAGAGC |
| 1017391 | ATGCACAAATGACAGTAGGG | GGACATTGTAGTAGTCAGGG |
| 2870701 | ATGCACAAATGACAGTAGGG | GGACATTGTAGTAGTCAGGG |
| 7679839 | CCACAGGAACTATTTGCTGG | GGAACAGCACAAGCAAAAAC |
| 1385404 | CCCAGCATCCTTGCTAATAC | CCTGTCAAGATGCATAGGAG |
| 1368716 | TGGGAGAACTGGGAAAATGG | TGCTACATACTGTAGCAGCC |
| 4693316 | ATCCTGTACTGCACTTCAGC | ACCCTCCATGGGAGTTTTTC |
| 1905707 | TTTTCTGTAGTTTCCCGAGC | AATGCAATCCACAGAGCAAG |
| 1905708 | GGAACAAATGAAGATAGATG | GGACCTATGTTTTATGAGTTC |
| 1905709 | TAGAATAGTTTCTCAGTGTC | GAACTCATAAAACATAGGTCC |
| 3912442 | CATAACTCAGGCAAAACAAC | GTTGAAAAAGCTCTATATTGG |
| 2082553 | TGGAGCCCACTCAGATATTC | CCCTGGAACATGTAAATGTG |
| 6831638 | CCATATACTTACCTTTACTG | AATGTGAGTTCTGAAGATGG |
| 5860329 | CCATGCTGGCTTTTGTGAAC | TCCTGACCCTTAGTCCAATG |
| 2870702 | CAAAGAATGAGAGGGAAGGC | TGTGGCCTACCAGAATTTGC |
| 2870703 | AATAAAGAGGACAGCAGGAG | CACAGTTGTACTCCTAGCTC |
| 1948016 | GAATGAATGCAGTGTGCCAG | TGAACCTATCTTGCAGGTGG |
| 6835836 | TTATTTAGGAAGCACTCAGC | GAGTCCAAGACTAGTAAAGAG |
| 1994253 | TTCACCTTTCTGTGTTCTCC | AAGAAGAAGAACAACTGTAC |
| 1905710 | CATTAAGTGAAGAGCTATTCC | CTTAAAAGCTATTCGTTAAGC |
| 1485019 | TTTAAGCTCCCCAAAAGGTG | TACTGTGACATTCCCTTCTC |
| 978191 | AGGTCTTATCTCTTGGAATG | CCCATTCAGATATATAGACAG |
| 1385405 | CATTCAGACCTGTGACAGGA | TGATGGGACTGTTCTTCAGG |
| 7694361 | CTAGTGATTCTGTGAATGTTG | CAATGTGATTGTGTTGGAAG |
| 1905711 | CAGTTAACACTCCATATCCAC | GAGCCTCAGTTTGTTGAATC |
| 1905734 | AATTTCAAGATCAGAGATCC | CCTAACATGAGTCCATTCTG |
| 1485012 | ATACACCTATGCTAAGAAGC | GCAGAAAAACTAGTACGATAC |
| 1485013 | ACACATCATAGTTTTACTGC | GGATGAAACTATGTGAAAGC |
| 4692981 | GCTAGCCTGGAATCAAACAC | CCGAAAACAAAAGCACCCTG |
| 7670552 | TTTGGCTGCAATCAACCATG | ATCCCAAGAGAAATGAAAAC |
| 7670932 | CCTTGAAAGCATGCTAAGGG | TGAGTCCCTATAGATTTGTC |
| 7688091 | TGGATTGTGCACTTTGGATG | ACCAGACTCTCTCTTTTTTA |
| 7440540 | TGCACAGACTGTTAAGGGAG | TCATCCTTTAAGCCTTGCCG |
| 2171000 | TGAGCCAAGTATGGAAAAAC | CTGGGATAATTGTTGGGATC |
| 2870704 | ATGCTCTTGGAGCTCAGAAG | ACATATTTCCCTGACCTCCC |
| 7655758 | GTCAAAACCTCTTACTGTGC | CATGGCAGCCTTACCAAAGA |
| 7661436 | ACTGAAATTCCTTGCTGAAC | TCTCCAGGTAAACTTCCAAG |
| 7662289 | AAAACAGTGAAAGACCTTGC | TATTGAGGCCGAGTAGTCTG |
| 7667044 | ACTGATAAAACAAAGGAGGG | GAAAGCAAGGTCTTTCACTG |
| 7691929 | TTTCTCAGCATATGTTCCAG | ATCAGTCTCAGGGAAGATGC |
| 5860330 | CTGCCTAGATGAAACAAATG | CTGCTGGAACATATGCTGAG |
| 901013 | AAGGTGCATCCCTCAGAAAG | GCCTGGCTGATCTAAGGTTT |
| 901012 | CTGAAATAGTGAGGGTAGTG | AAGATGTGGAGAGAACAAGG |
| 901011 | AAAAGGGAAGGGAAGTGTGG | ACTCTCCTCCAAGAGCTTTC |
| 1948018 | TTTATCAGCAAGCATGTGAG | GTTTTCTGGAAAACTTTTACC |
| 2870705 | TAGTGCATGAGAAAGTCTAC | TTGCTTATCTGACTGGCAAG |
| 1948017 | GTTTAACAGCAACCATTGAGG | CCCCAAAGGTATGTTAAGAG |
| 1905733 | TGGAAGAGTATTAACTTCTG | TTAGTCTATTGATTGAAAGC |
| 1385408 | ACTCTTCCAAAGACTGATGC | GGATGTGGGGTTATAAGAAC |
| 1385409 | TTGCCTCTTCCAGTCTATTG | CAGAGGAGAGACATGATCAG |
| 1385410 | AGAGACAGAAGAGACACTAG | CCCCATCCAAATACATTGCC |
| 1485026 | GAGAAGAAGGCATATGTGAG | CTCACTCTTTCTTCTGTCTG |
| 1485027 | TGGTGATGATAGGTGCTGTG | ACACAGGTGCTTTCTAATTG |
| 2904483 | CTTCTCTCCATGAAACTCAG | AGGAGATATCAAGACACCAG |
| 1385406 | CTCCATTATCTGTTTGCAGT | CTCTGAGTAGTGTTTTCTGG |
| 1905732 | CTGTTCCTTGTTTCTTCTGC | GTGGTGTTTGCCATTAAAAG |
| 2046418 | AGGAGAGAAGTCTATGTCCC | TTCTTACATTCTAGAGCCTT |
| 2200377 | GGATGGACTATTGTTTTCTT | CCTATCTTGATTAGATTACAG |
| 1905731 | TCACTGCTTAGAAACTAATC | AAACACCTTTCTGAGAATTG |
| 1905730 | AAACTGAAGCAGATTCTGAC | CTTTGTTCTTTCAATTCTCAG |
| 975713 | GCTAATTTTCCTAGGATCTC | AGTGAGCCCCAAAATCTGTG |
| 6820985 | CTAAGCCTAATAAAGGAGGG | ATATATAGAAAAGACTGGAG |
| 7670441 | CAATAATGACATGCTCTTAC | CGTATAGCAATCATACACAAG |
| 6810794 | ATGATGGAGCTCCAGAAAAG | CAGAGATATTTAGTGGCAAC |
| 7676623 | TTCAGAGCTCACTTTCCAAC | GGGGCTACCAAACTTAAAAG |
| 1154861 | GACACTGAATCCATAGATCG | CCTTTTTAAATAACCAGTGAC |
| 1032125 | CCTCATGCTTTAATAGGTAG | CACACATTTCTATAGTACTTG |
| 1485022 | AAATTAGGCTGAAGGAACAG | GCTTGATGGTTATTACAATGG |
| 1485024 | CGTTTCCACCACCTGGAAAT | CTGGCTTTCTTCCATTGTTG |
| 3913651 | CCTTGAGTATCTAAGAAAGGC | AAAATATACTTGTTTTGAGC |
| 4693319 | TCAAGAGTGGAAAGGGAGAG | CAGCTCCACTCACTATCTTG |
| 1872383 | TGGCCTCAAATGCATGTGTC | CTTTGGAGCTATCCAAATGG |
| 2200376 | GTGTTTGAGAAAGAAGTGTG | GAGTTCAGACAGAGTATGAG |
| 7668090 | GTAGGCCTGAGAATGCATTG | GACATTCCATTATTCCTCCC |
| 7692930 | ATGAGAACACATGGACACGG | TCTCCTAATGCTATCCCTCC |
| 967096 | GATTGGAAAAGGGCAACAGG | TCCATGAGAATGTTCCTCAG |
| 6822249 | AAAGGATGTTTCCATTTCTC | CCTAGAAAGGTAGTTGATGC |
| 6532405 | CTCAGGATCATTGAGACTTAG | CTTGAAAGATAACTGCGGAC |
| 1017897 | TGCCCAAACTGCAAATACAC | GCTACATTAAGTGAATTCTAC |
| 7672674 | CTACAACAGACAAGGATGGG | CAATGCCTTCAGCATTTTCC |
| 7694568 | CCATTTCTAATGGGTACCTC | TGCCATACACTACAACAGAC |
| 2904484 | ATTTTCACATTGCTTTGCCC | GAACAAGCAGAGCAAGTAAG |
| 7340830 | CAATCTCAAAACAGTGTTTAC | ACTAAGAAAGGAGAGAACAG |
| 1485033 | CTGGCTGGAATGTTAATAGG | TGTGCTCCTCAGTACATAGC |
| 2870706 | CCTGCAGGAAGAAAATAGGC | AGGGAAGCAAAACTAAGATG |
| 1905729 | GGGAATTACTCTAGCTCTTC | AGGAAAGAGTAGGCCAAATG |
| 4693320 | TCAAACTAGTAGCCCACAAA | GTATAGATTACAGTAGATGTG |
| 6848749 | CCATCTTTTTGTCTGCATTC | CAGTCAATTTTCATATTGCC |
| 6532406 | GCATGGCTCTTAGGAGAAAG | GCTGGAAGGGAAAATGGTAC |
| 6532407 | TTGTTTTCCTAGGCTCCAGC | TGGCTACAATAGGGAGACTG |
| 1905728 | GCAAGTTCATTTTCATATAGC | TAAAACAGTGTGAAATTTTG |
| | G | |
| 6819866 | CACACATAGCTCTTCTGTAAG | GCCTCGAGGAAAAAAAAATAG |
| 1905727 | AAGGGATAACAAGACAAATG | ACCCCATGATCTACTATTTC |
| 7674069 | CAGTTACTCCAAACTTACGG | GGTAACAAAGGCACTCAAGG |
| 1905724 | GCTCTCAGTGTCTTTTAATG | CGCATATGATTAGCTACTTC |
| 1905723 | GGGTTTATAAGCCTTTTCTTC | CTTGCTAACAATGAAAAGGTG |
| 1485020 | GTTGTCATTTTATGTCCTCCG | TAGAGTCACTGCCAATAAAC |
| 8814101 | GAGGACTTCAATGACTTTGC | TCAGACACAAACATCTGAAG |

[0283] TABLE 18

| | | |
|---|---|---|
| dbSNP | Extend | Term |
| rs# | Primer | Mix |

| | | |
|---|---|---|
| 1433661 | CATGGGATTCCAGGTGT | ACT |
| 1485009 | CCTCTTCTGGAAAATCTTAA | ACT |
| 7681947 | ACGAATTAGTCCAAGGA | ACT |
| 1816432 | TGAGATAGTTAATTTTGTTTTCCA | ACT |
| 1485018 | CAGTGAGCCATGACTGT | ACT |
| 1485017 | GGTCTAAAACTCCTGAGAT | CGT |
| 7438397 | CTCCTGCCTTGGCCTCC | ACG |
| 6834311 | GAAGAGAAAGAGATGGC | ACG |
| 1368717 | AGGGATCGGAAATTTAAGAAGAA | ACT |
| 1017391 | AATGACAGTAGGGATTATAGTAA | ACT |
| 2870701 | GACAGTAGGGATTATAGTAAG | CGT |
| 7679839 | ATTTGCTGGCCCTTTAA | ACT |
| 1385404 | CCTAAAGCAGCCACTGT | ACT |
| 1368716 | CAATGAGAAATGCCAGC | ACG |
| 4693316 | GCGATAGAGTGAGATTCTG | ACG |
| 1905707 | TGTAGTTTCCCGAGCTAGATT | ACT |
| 1905708 | AGATAGATGAATGGAGAACCC | ACT |
| 1905709 | GTTTCTCAGTGTCATCAAATA | CGT |
| 3912442 | AAAAAGACATATCTTCTTTTAGTG | CGT |
| 2082553 | CCACTCAGATATTCCATAAC | ACT |
| 6831638 | CCTTTACTGTGATATTTATTTCTT | ACG |
| 5860329 | GCTCCTGAAACATATTCATG | ACT |
| 2870702 | GAAGGCATTATGACATGAAT | ACG |
| 2870703 | TTGTTTATTCAAATCTGCCA | ACG |
| 1948016 | GCCAGTAATCTCTCCAATGAT | CGT |
| 6835836 | CACTCAGCTGAATAGACA | ACT |
| 1994253 | CTGACTCATACATCCTTTG | ACT |
| 1905710 | GAGCTATTCCAATGTGCT | CGT |
| 1485019 | AAGCTCCCCAAAAGGTGTTTAATT | CGT |
| 978191 | TGTACAAATCTGAGGGC | ACG |
| 1385405 | CCTGTGACAGGATTCCAGCA | CGT |
| 7694361 | GGATTACAGTAGTTTCCC | ACG |
| 1905711 | CCATATCCACAGGTTCT | ACT |
| 1905734 | CTTAGCCACTCTGATAATCT | ACT |
| 1485012 | ACACTGCAAAAAGCACT | ACT |
| 1485013 | TGCAGAGATAATGTATGTAGAA | ACT |
| 4692981 | TCAAACACAGTTTATATGAGATAA | CGT |
| 7670552 | CAACCATGCTGCTATGA | ACT |
| 7670932 | CATGCTAAGGGAAAGAAG | ACG |
| 7688091 | GGATGGGTGAATTGTATATTAT | ACT |
| 7440540 | TTAAGGGAGAGCATGAAA | ACT |
| 2171000 | GGTAGAAATGGACTTTGA | ACG |
| 2870704 | GCAGCTTCCTAACAAAAA | ACT |
| 7655758 | GCCTTTGAAAGAATCCAA | ACT |
| 7661436 | CTTTTTTGTTTCTATCCAGG | ACG |
| 7662289 | TGCTTCTTTATTCCCCA | ACT |
| 7667044 | GCTTTGTTTTTGATGAGTG | ACG |
| 7691929 | TTAATTCCTGAGACGTGT | ACT |
| 5860330 | CTTGCAAGTGATTAAAAAAAAAA | ACT |
| 901013 | GAAAGCATTCATCTCACTA | ACT |
| 901012 | GTAGTGTCTACAAAGGGTATA | ACT |
| 901011 | GTTGATCTCCTTCCTGG | ACT |
| 1948018 | GAGAAAGTAGACTTTCTCAT | ACT |
| 2870705 | CTTTCTCACATGCTTGC | ACT |
| 1948017 | CAGCAACCATTGAGGGTGAAT | ACG |
| 1905733 | TGTCCTTGACTGATTTTTAG | ACG |
| 1385408 | TCTAGGAAGTATGAGATGG | ACT |
| 1385409 | CAATAGTAACTGTCAACTGT | ACT |
| 1385410 | CAAGGAAGCTAGAGCCA | ACT |
| 1485026 | CTTCAATTAGAAAGCACCT | ACT |
| 1485027 | GTGCTGTGAAGACAAATTA | CGT |
| 2904483 | GGATTGTTTCTTCCTCT | CGT |
| 1385408 | TGTATACAGAAAAAAGCATGA | CGT |
| 1905732 | GTTGGTGCAAAAGTAACT | ACT |
| 2046418 | GTCTATCTCCCTGACAC | ACG |
| 2200377 | AAAAATTAAAACATTCACTGCTTA | ACT |
| 1905731 | TTCTGTAATCTAATCAAGATAGG | ACT |
| 1905730 | TCTGACAGGACTAAACAA | ACT |
| 975713 | GGTCACCTAAGGATTTTACA | ACT |
| 6820985 | AAAGGAGGCCTCTACCC | ACT |
| 7670441 | CATGCTCTTACATGCAAATA | ACT |
| 6810794 | CCACAAAACCAAGCTTATTA | CGT |
| 7676623 | TCTTCTTTAATGTGATGGTAC | ACT |
| 1154861 | GAATCCATAGATCGTATACTAAT | ACG |
| 1032125 | ATTTATATTCCGCCCCA | CGT |
| 1485022 | TCCAAAACGACCAGTCA | CGT |
| 1485024 | TTCATGCTAACTGATTATCAAAT | ACT |
| 3913651 | GGCAAAATTCCATGGCC | ACG |
| 4693319 | GAGTAATTGGACCTCTAC | ACT |
| 1872383 | CCATTCCATATCCTTACC | CGT |
| 2200376 | TTTTACATCTCACCCCA | CGT |
| 7668090 | GAATGCATTGGAGTGAG | ACT |
| 7692930 | ATCACACTCCGGGGACT | ACT |
| 967096 | AGGGCAACAGGGACACA | ACT |
| 6822249 | GTATTCACCATTGCAAAAA | CGT |
| 6532405 | GAACAACTGAAATCTGAAGTA | ACG |
| 1017897 | AACTGCAAATACACATTTCA | ACT |
| 7672674 | GTTTTGAACACTTAATGTTTG | ACT |
| 7694568 | GATTTCACCCCTTTCCC | ACG |
| 2904484 | AAATGTTCTCCAAGAAAGAT | ACT |
| 7340830 | GTTTACATATGAGGAAATGTAG | ACG |
| 1485033 | GCCCTCTAAAGACATGA | ACT |
| 2870706 | GAAGAAAATAGGCTGATTTTAT | ACT |
| 1905729 | CTAGCTCTTCAGAATTAATTGG | ACT |
| 4693320 | CCCACAAAGTCTTATGCA | ACT |
| 6848749 | CCAACAGAGAGAGGTATTTA | CGT |
| 6532406 | CATGGTCTACACACCTTTA | ACG |
| 6532407 | CCTTGTAAGACTACCTGAA | ACT |
| 1905728 | CAGTTAATAATTGTAGATCCATG | ACT |
| 6819866 | GCTCTTCTGTAAGAAGTCT | CGT |
| 1905727 | ATGATTGTAGATCATTTTGATGTA | ACT |
| 7674069 | TTCCTAACTCTTCACCTT | ACT |
| 1905724 | CATTGTTAGCAAGTGGAA | ACT |
| 1905723 | GAGCATAAAGATGCTCTCAGT | ACT |
| 1485020 | CTCCGTTATCTCCATGT | ACT |
| 6814101 | GCAAATGTAGTTGTATGTAATTT | ACT |

[0284] Genetic Analysis

[0285] Allelotyping results are shown for female cases and controls in Table 19. The allele frequency for the A2 allele is noted in the fifth and sixth columns for control pools and case pools, respectively, where “AF” is allele frequency. Some SNPs do not have an allele frequency disclosed because of failed assays.

TABLE 19

| | Position in | | | | | | | Low BMD |
|---|---|---|---|---|---|---|---|---|
| | SEQ ID | Chromosome | A1/A2 | Control AF | Case AF | | | Associated |
| dbSNP rs# | NO: 3 | Position | Allele | (High BMD) | (Low BMD) | p-Value | OR | Allele |
| 1433661 | 206 | 94744306 | T/C | T = 0.11 | T = 0.17 | 0.0089 | 1.64 | T |
| | | | | C = 0.89 | C = 0.83 | | | |
| 1485009 | 243 | 94744343 | A/G | A = 0.00 | A = 0.00 | | | |
| | | | | G = 1.00 | G = 1.00 | | | |
| 7681947 | 2467 | 94746567 | T/C | T = | T = 0.89 | | | |
| | | | | C = | C = 0.11 | | | |
| 1816432 | 3550 | 94747650 | A/G | A = 0.56 | A = 0.61 | 0.0779 | 1.23 | A |
| | | | | G = 0.44 | G = 0.39 | | | |
| 1485018 | 4994 | 94749094 | C/G | C = 1.00 | C = 0.99 | | | |
| | | | | G = 0.00 | G = 0.01 | | | |
| 1485017 | 5167 | 94749267 | G/T | G = | G = | | | |
| | | | | T = | T = | | | |
| 7438397 | 5193 | 94749293 | C/T | C = 0.94 | C = 0.94 | 0.8804 | 0.96 | C |
| | | | | T = 0.06 | T = 0.06 | | | |
| 6834311 | 5273 | 94749373 | G/A | G = 0.51 | G = 0.56 | 0.1212 | 1.20 | G |
| | | | | A = 0.49 | A = 0.44 | | | |
| 1368717 | 5733 | 94749833 | A/G | A = 0.10 | A = 0.13 | 0.1573 | 1.31 | A |
| | | | | G = 0.90 | G = 0.87 | | | |
| 1017391 | 7817 | 94751917 | A/C | A = 0.64 | A = 0.63 | 0.6402 | 0.94 | C |
| | | | | C = 0.36 | C = 0.37 | | | |
| 2870701 | 7818 | 94751918 | T/A | T = 0.00 | T = 0.00 | | | |
| | | | | A = 1.00 | A = 1.00 | | | |
| 7679839 | 8612 | 94752712 | T/G | T = 0.97 | T = 0.90 | 0.0000 | 0.31 | G |
| | | | | G = 0.03 | G = 0.10 | | | |
| 1385404 | 9158 | 94753258 | A/G | A = | A = 1.00 | | | |
| | | | | G = | G = 0.00 | | | |
| 1368716 | 9285 | 94753385 | G/A | G = 0.89 | G = 0.83 | 0.0251 | 0.62 | A |
| | | | | A = 0.11 | A = 0.17 | | | |
| 4693316 | 10680 | 94754780 | G/A | G = 0.57 | G = 0.53 | 0.2431 | 0.87 | A |
| | | | | A = 0.43 | A = 0.47 | | | |
| 1905707 | 11866 | 94755966 | T/C | T = 0.07 | T = 0.13 | 0.0008 | 1.99 | T |
| | | | | C = 0.93 | C = 0.87 | | | |
| 1905708 | 11958 | 94756058 | A/G | A = 0.97 | A = 0.92 | 0.0003 | 0.35 | G |
| | | | | G = 0.03 | G = 0.08 | | | |
| 1905709 | 12044 | 94756144 | A/T | A = 0.05 | A = 0.06 | 0.8882 | 1.08 | A |
| | | | | T = 0.95 | T = 0.94 | | | |
| 3912442 | 12753 | 94756853 | G/T | G = 0.00 | G = 0.00 | | | |
| | | | | T = 1.00 | T = 1.00 | | | |
| 2082553 | 15585 | 94759685 | A/G | A = 0.00 | A = 0.11 | | | |
| | | | | G = 1.00 | G = 0.89 | | | |
| 6831638 | 17299 | 94761399 | C/T | C = 1.00 | C = 1.00 | | | |
| | | | | T = 0.00 | T = 0.00 | | | |
| 5860329 | 18816 | 94762916 | —/G | — = 0.00 | — = 0.00 | | | |
| | | | | G = 1.00 | G = 1.00 | | | |
| 2870702 | 24022 | 94768122 | C/T | C = 0.66 | C = 0.65 | 0.8596 | 0.98 | T |
| | | | | T = 0.34 | T = 0.35 | | | |
| 2870703 | 24994 | 94769094 | C/T | C = 0.63 | C = 0.62 | 0.7613 | 0.96 | T |
| | | | | T = 0.37 | T = 0.38 | | | |
| 1948016 | 26637 | 94770737 | G/T | G = 0.52 | G = 0.47 | 0.1367 | 0.84 | T |
| | | | | T = 0.48 | T = 0.53 | | | |
| 6835836 | 27635 | 94771735 | C/G | C = 0.00 | C = 0.00 | | | |
| | | | | G = 1.00 | G = 1.00 | | | |
| 1994253 | 28773 | 94772873 | T/C | T = 0.92 | T = 0.87 | 0.0134 | 0.61 | C |
| | | | | C = 0.08 | C = 0.13 | | | |
| 1905710 | 29430 | 94773530 | A/T | A = 0.39 | A = 0.34 | 0.2784 | 0.83 | T |
| | | | | T = 0.61 | T = 0.66 | | | |
| 1485019 | 29876 | 94773976 | T/A | T = 0.14 | T = 0.19 | 0.0338 | 1.42 | T |
| | | | | A = 0.86 | A = 0.81 | | | |
| 978191 | 30364 | 94774464 | C/T | C = 0.00 | C = 0.00 | | | |
| | | | | T = 1.00 | T = 1.00 | | | |
| 1385405 | 31057 | 94775157 | C/A | C = 0.68 | C = 0.66 | 0.6519 | 0.94 | A |
| | | | | A = 0.32 | A = 0.34 | | | |
| 7694361 | 31782 | 94775882 | C/T | C = 0.21 | C = 0.24 | 0.1629 | 1.22 | C |
| | | | | T = 0.79 | T = 0.76 | | | |
| 1905711 | 33400 | 94777500 | A/C | A = 0.00 | A = 0.00 | | | |
| | | | | C = 1.00 | C = 1.00 | | | |
| 1905734 | 35588 | 94779688 | A/C | A = 0.92 | A = 0.88 | 0.0229 | 0.61 | C |
| | | | | C = 0.08 | C = 0.12 | | | |
| 1485012 | 37663 | 94781763 | C/G | C = 0.96 | C = 0.91 | 0.0032 | 0.47 | G |
| | | | | G = 0.04 | G = 0.09 | | | |
| 1485013 | 37865 | 94781965 | T/C | T = 0.00 | T = 0.00 | | | |
| | | | | C = 1.00 | C = 1.00 | | | |
| 4692981 | 38218 | 94782318 | A/T | A = 0.68 | A = 0.72 | 0.1741 | 1.19 | A |
| | | | | T = 0.32 | T = 0.28 | | | |
| 7670552 | 39375 | 94783475 | T/C | T = 0.11 | T = 0.22 | 0.0000 | 2.26 | T |
| | | | | C = 0.89 | C = 0.78 | | | |
| 7670932 | 39559 | 94783659 | C/T | C = 1.00 | C = 1.00 | | | |
| | | | | T = 0.00 | T = 0.00 | | | |
| 7688091 | 39833 | 94783933 | A/G | A = 0.00 | A = 0.13 | | | |
| | | | | G = 1.00 | G = 0.87 | | | |
| 7440540 | 40135 | 94784235 | A/G | A = 0.00 | A = 0.00 | | | |
| | | | | G = 1.00 | G = 1.00 | | | |
| 2171000 | 41698 | 94785798 | G/A | G = 0.00 | G = 0.00 | | | |
| | | | | A = 1.00 | A = 1.00 | | | |
| 2870704 | 42249 | 94786349 | T/C | T = 0.53 | T = 0.53 | 0.8418 | 1.02 | T |
| | | | | C = 0.47 | C = 0.47 | | | |
| 7655758 | 42571 | 94786671 | G/C | G = 0.21 | G = 0.25 | 0.0531 | 1.32 | G |
| | | | | C = 0.79 | C = 0.75 | | | |
| 7661436 | 42977 | 94787077 | G/A | G = 0.44 | G = 0.45 | 0.7243 | 1.04 | G |
| | | | | A = 0.56 | A = 0.55 | | | |
| 7662289 | 43548 | 94787648 | T/C | T = 0.24 | T = 0.29 | 0.1625 | 1.27 | T |
| | | | | C = 0.76 | C = 0.71 | | | |
| 7667044 | 43631 | 94787731 | G/A | G = 0.18 | G = 0.22 | 0.0669 | 1.31 | G |
| | | | | A = 0.82 | A = 0.78 | | | |
| 7691929 | 43705 | 94787805 | T/C | T = 0.93 | T = 0.90 | 0.0439 | 0.64 | C |
| | | | | C = 0.07 | C = 0.10 | | | |
| 5860330 | 43817 | 94787917 | T/— | T = 0.48 | T = 0.52 | 0.1449 | 1.19 | T |
| | | | | — = 0.52 | — = 0.48 | | | |
| 901013 | 44374 | 94788474 | A/C | A = 0.00 | A = 0.00 | | | |
| | | | | C = 1.00 | C = 1.00 | | | |
| 901012 | 44464 | 94788564 | A/C | A = 0.00 | A = 0.00 | | | |
| | | | | C = 1.00 | C = 1.00 | | | |
| 901011 | 44788 | 94788888 | T/C | T = 1.00 | T = 1.00 | | | |
| | | | | C = 0.00 | C = 0.00 | | | |
| 1948018 | 48962 | 94793062 | A/G | A = 0.10 | A = 0.19 | 0.0002 | 2.20 | A |
| | | | | G = 0.90 | G = 0.81 | | | |
| 2870705 | 48993 | 94793093 | T/G | T = 1.00 | T = 1.00 | | | |
| | | | | G = 0.00 | G = 0.00 | | | |
| 1948017 | 49110 | 94793210 | C/T | C = 0.12 | C = 0.17 | 0.0068 | 1.60 | C |
| | | | | T = 0.88 | T = 0.83 | | | |
| 1905733 | 49434 | 94793534 | C/T | C = 0.02 | C = 0.03 | 0.5881 | 1.41 | C |
| | | | | T = 0.98 | T = 0.97 | | | |
| 1385408 | 49523 | 94793623 | T/G | T = 1.00 | T = 1.00 | | | |
| | | | | G = 0.00 | G = 0.00 | | | |
| 1385409 | 49742 | 94793842 | C/G | C = 1.00 | C = 1.00 | | | |
| | | | | G = 0.00 | G = 0.00 | | | |
| 1385410 | 49907 | 94794007 | G/C | G = 0.53 | G = 0.51 | 0.5313 | 0.93 | C |
| | | | | C = 0.47 | C = 0.49 | | | |
| 1485026 | 50028 | 94794128 | G/C | G = 1.00 | G = 1.00 | | | |
| | | | | C = 0.00 | C = 0.00 | | | |
| 1485027 | 50089 | 94794189 | G/T | G = 0.00 | G = 0.00 | | | |
| | | | | T = 1.00 | T = 1.00 | | | |
| 2904483 | 51588 | 94795688 | C/A | C = 0.68 | C = 0.65 | 0.4125 | 0.90 | A |
| | | | | A = 0.32 | A = 0.35 | | | |
| 1385406 | 52899 | 94796999 | C/A | C = 0.00 | C = 0.00 | | | |
| | | | | A = 1.00 | A = 1.00 | | | |
| 1905732 | 54088 | 94798188 | A/C | A = 0.48 | A = 0.47 | 0.8078 | 0.97 | C |
| | | | | C = 0.52 | C = 0.53 | | | |
| 2046418 | 56538 | 94800638 | C/T | C = 0.64 | C = 0.65 | 0.9229 | 1.01 | C |
| | | | | T = 0.36 | T = 0.35 | | | |
| 2200377 | 59071 | 94803171 | T/C | T = 0.00 | T = 0.04 | | | |
| | | | | C = 1.00 | C = 0.96 | | | |
| 1905731 | 59110 | 94803210 | A/C | A = 1.00 | A = 1.00 | | | |
| | | | | C = 0.00 | C = 0.00 | | | |
| 1905730 | 59178 | 94803278 | A/G | A = 0.74 | A = 0.73 | 0.9270 | 0.99 | G |
| | | | | G = 0.26 | G = 0.27 | | | |
| 975713 | 61087 | 94805187 | T/C | T = 1.00 | T = 1.00 | | | |
| | | | | C = 0.00 | C = 0.00 | | | |
| 6820985 | 61300 | 94805400 | C/G | C = 0.99 | C = 0.99 | | | |
| | | | | G = 0.01 | G = 0.01 | | | |
| 7670441 | 62171 | 94806271 | T/C | T = 0.67 | T = 0.66 | 0.7167 | 0.96 | C |
| | | | | C = 0.33 | C = 0.34 | | | |
| 6810794 | 62783 | 94806883 | T/A | T = 1.00 | T = 1.00 | | | |
| | | | | A = 0.00 | A = 0.00 | | | |
| 7676623 | 62983 | 94807083 | T/C | T = 0.00 | T = 0.00 | | | |
| | | | | C = 1.00 | C = 1.00 | | | |
| 1154861 | 63908 | 94808008 | C/T | C = 0.73 | C = 0.70 | 0.2406 | 0.84 | T |
| | | | | T = 0.27 | T = 0.30 | | | |
| 1032125 | 64088 | 94808188 | G/T | G = 0.50 | G = 0.51 | 0.9342 | 1.01 | G |
| | | | | T = 0.50 | T = 0.49 | | | |
| 1485022 | 64941 | 94809041 | A/T | A = 1.00 | A = 0.98 | | | |
| | | | | T = 0.00 | T = 0.02 | | | |
| 1485024 | 65050 | 94809150 | A/G | A = 0.04 | A = 0.12 | 0.0000 | 3.18 | A |
| | | | | G = 0.96 | G = 0.88 | | | |
| 3913651 | 68953 | 94813053 | C/T | C = 0.40 | C = 0.41 | 0.6884 | 1.05 | C |
| | | | | T = 0.60 | T = 0.59 | | | |
| 4693319 | 70093 | 94814193 | T/C | T = 0.81 | T = 0.80 | 0.7260 | 0.95 | C |
| | | | | C = 0.19 | C = 0.20 | | | |
| 1872383 | 71308 | 94815408 | C/A | C = 0.35 | C = 0.38 | 0.4769 | 1.10 | C |
| | | | | A = 0.65 | A = 0.62 | | | |
| 2200376 | 73009 | 94817109 | T/A | T = 0.65 | T = 0.63 | 0.6117 | 0.92 | A |
| | | | | A = 0.35 | A = 0.37 | | | |
| 7668090 | 74002 | 94818102 | A/G | A = 0.61 | A = 0.59 | 0.4762 | 0.92 | G |
| | | | | G = 0.39 | G = 0.41 | | | |
| 7692930 | 74294 | 94818394 | T/C | T = 0.00 | T = 0.00 | | | |
| | | | | C = 1.00 | C = 1.00 | | | |
| 967096 | 74879 | 94818979 | G/C | G = 0.00 | G = 0.00 | | | |
| | | | | C = 1.00 | C = 1.00 | | | |
| 6822249 | 76936 | 94821036 | G/T | G = 0.20 | G = | | | |
| | | | | T = 0.80 | T = | | | |
| 6532405 | 77195 | 94821295 | G/A | G = 0.44 | G = 0.46 | 0.5246 | 1.08 | G |
| | | | | A = 0.56 | A = 0.54 | | | |
| 1017897 | 77683 | 94821783 | T/C | T = 0.75 | T = 0.72 | 0.3873 | 0.89 | C |
| | | | | C = 0.25 | C = 0.28 | | | |
| 7672674 | 78283 | 94822383 | T/C | T = 0.81 | T = 0.82 | 0.6661 | 1.07 | T |
| | | | | C = 0.19 | C = 0.18 | | | |
| 7694568 | 78331 | 94822431 | C/T | C = 0.82 | C = 0.91 | 0.0004 | 2.33 | C |
| | | | | T = 0.18 | T = 0.09 | | | |
| 2904484 | 79362 | 94823462 | G/C | G = 0.67 | G = 0.66 | 0.8007 | 0.97 | C |
| | | | | C = 0.33 | C = 0.34 | | | |
| 7340830 | 80357 | 94824457 | C/T | C = 1.00 | C = 1.00 | | | |
| | | | | T = 0.00 | T = 0.00 | | | |
| 1485033 | 80653 | 94824753 | T/C | T = 0.74 | T = 0.73 | 0.6809 | 0.95 | C |
| | | | | C = 0.26 | C = 0.27 | | | |
| 2870706 | 80840 | 94824940 | A/G | A = 0.65 | A = 0.65 | 0.9576 | 1.01 | A |
| | | | | G = 0.35 | G = 0.35 | | | |
| 1905729 | 83203 | 94827303 | A/G | A = 0.66 | A = 0.62 | 0.1186 | 0.82 | G |
| | | | | G = 0.34 | G = 0.38 | | | |
| 4693320 | 85405 | 94829505 | T/C | T = 0.67 | T = 0.73 | 0.0335 | 1.32 | T |
| | | | | C = 0.33 | C = 0.27 | | | |
| 6848749 | 86441 | 94830541 | G/T | G = 0.14 | G = 0.22 | 0.0016 | 1.68 | G |
| | | | | T = 0.86 | T = 0.78 | | | |
| 6532406 | 86967 | 94831067 | G/A | G = 0.98 | G = 0.95 | 0.0460 | 0.44 | A |
| | | | | A = 0.02 | A = 0.05 | | | |
| 6532407 | 87121 | 94831221 | T/C | T = 0.95 | T = 0.91 | 0.0301 | 0.57 | C |
| | | | | C = 0.05 | C = 0.09 | | | |
| 1905728 | 89617 | 94833717 | T/C | T = 0.00 | T = 0.00 | | | |
| | | | | C = 1.00 | C = 1.00 | | | |
| 6819866 | 90969 | 94835069 | T/A | T = 0.51 | T = 0.42 | 0.0157 | 0.70 | A |
| | | | | A = 0.49 | A = 0.58 | | | |
| 1905727 | 94249 | 94838349 | G/C | G = 0.06 | G = 0.09 | 0.1689 | 1.48 | G |
| | | | | C = 0.94 | C = 0.91 | | | |
| 7674069 | 95811 | 94839911 | T/G | T = 1.00 | T = 1.00 | | | |
| | | | | G = 0.00 | G = 0.00 | | | |
| 1905724 | 96690 | 94840790 | T/G | T = 0.06 | T = 0.07 | 0.3032 | 1.31 | T |
| | | | | G = 0.94 | G = 0.93 | | | |
| 1905723 | 96731 | 94840831 | A/G | A = 0.71 | A = 0.70 | 0.7768 | 0.96 | G |
| | | | | G = 0.29 | G = 0.30 | | | |
| 1485020 | 97267 | 94841367 | C/G | C = 1.00 | C = 1.00 | | | C |
| | | | | G = 0.00 | G = 0.00 | | | |
| 6814101 | 97414 | 94841514 | T/G | T = | T = 0.00 | | | G |
| | | | | G = | G = 1.00 | | | |

[0286] Allelotyping results were considered particularly significant with a calculated p-value of less than or equal to 0.05 for allelotype results. These values are indicated in bold. The allelotyping p-values were plotted in FIG. 3. The position of each SNP on the chromosome is presented on the x-axis. The y-axis gives the negative logarithm (base 10) of the p-value comparing the estimated allele in the case group to that of the control group. The minor allele frequency of the control group for each SNP designated by an X or other symbol on the graphs in FIG. 3 can be determined by consulting Table 19. For example, the left-most X on the left graph is at position 44917643. By proceeding down the Table from top to bottom and across the graphs from left to right the allele frequency associated with each symbol shown can be determined.

[0287] To aid the interpretation, multiple lines have been added to the graph. The broken horizontal lines are drawn at two common significance levels, 0.05 and 0.01. The vertical broken lines are drawn every 20 kb to assist in the interpretation of distances between SNPs. Two other lines are drawn to expose linear trends in the association of SNPs to the disease. The light gray line (or generally bottom-most curve) is a nonlinear smoother through the data points on the graph using a local polynomial regression method (W. S. Cleveland, E. Grosse and W. M. Shyu (1992) Local regression models. Chapter 8 of Statistical Models in S eds J. M. Chambers and T. J. Hastie, Wadsworth & Brook/Cole). The black line provides a local test for excess statistical significance to identify regions of association. This was created by use of a 10 kb sliding window with 1 kb step sizes. Within each window, a chi-square goodness of fit test was applied to compare the proportion of SNPs that were significant at a test wise level of 0.01, to the proportion that would be expected by chance alone (0.05 for the methods used here). Resulting p-values that were less than 10⁻⁸ were truncated at that value.

[0288] Finally, the exons and introns of the genes in the covered region are plotted below each graph at the appropriate chromosomal positions. The gene boundary is indicated by the broken horizontal line. The exon positions are shown as thick, unbroken bars. An arrow is place at the 3′ end of each gene to show the direction of transcription.

### Example 8

### PDE4D Proximal SNPs

[0289] It has been discovered that a polymorphic variation (rs1498608) in a gene encoding PDE4D is associated with the occurrence of low BMD (see Examples 1 and 2). One hundred sixteen additional allelic variants proximal to rs1498608 were identified and subsequently allelotyped in low BMD case and high BMD control sample sets as described in Examples 1 and 2. The polymorphic variants are set forth in Table 20. The chromosome position provided in column four of Table 20 is based on Genome “Build 34” of NCBI's GenBank.

TABLE 20

| | Position in | | | | | |
|---|---|---|---|---|---|---|
| | SEQ ID | | Chromosome | | | |
| dbSNP | NO: 4 | Chromosome | Position | Alleles (A1/A2) | genome_letter | deduced_iupac |
| 6886495 | 249 | 5 | 58309549 | g/c | g | S |
| 6450498 | 543 | 5 | 58309843 | a/t | a | W |
| 1472456 | 973 | 5 | 58310273 | g/a | c | Y |
| 4700315 | 1076 | 5 | 58310376 | a/g | a | R |
| 4700316 | 1276 | 5 | 58310576 | g/c | g | S |
| 7714708 | 1599 | 5 | 58310899 | a/g | a | R |
| 7710479 | 2755 | 5 | 58312055 | c/t | c | Y |
| 2968013 | 2911 | 5 | 58312211 | g/c | c | S |
| 2968014 | 4466 | 5 | 58313766 | a/g | a | R |
| 2968015 | 5754 | 5 | 58315054 | t/c | c | Y |
| 1391648 | 5762 | 5 | 58315062 | a/g | c | Y |
| 2055297 | 5967 | 5 | 58315267 | a/g | c | Y |
| 2055296 | 5972 | 5 | 58315272 | a/g | t | Y |
| 3989138 | 6390 | 5 | 58315690 | —/aa | a | N |
| 4700317 | 6984 | 5 | 58316284 | c/t | t | Y |
| 2036220 | 7234 | 5 | 58316534 | g/a | c | Y |
| 7727206 | 8196 | 5 | 58317496 | g/t | t | K |
| 7723432 | 8369 | 5 | 58317669 | a/g | a | R |
| 1546221 | 9565 | 5 | 58318865 | c/t | g | R |
| 4479801 | 11084 | 5 | 58320384 | c/t | c | Y |
| 4395595 | 11153 | 5 | 58320453 | c/t | c | Y |
| 4395596 | 11187 | 5 | 58320487 | t/c | c | Y |
| 4699932 | 11290 | 5 | 58320590 | g/a | a | R |
| 2936201 | 11386 | 5 | 58320686 | a/g | t | Y |
| 7356672 | 11441 | 5 | 58320741 | c/t | c | Y |
| 2936200 | 12373 | 5 | 58321673 | a/g | c | Y |
| 1909296 | 12602 | 5 | 58321902 | c/a | g | K |
| 7703131 | 13763 | 5 | 58323063 | c/g | c | S |
| 7445308 | 18697 | 5 | 58327997 | a/t | t | W |
| 3087748 | 18854 | 5 | 58328154 | t/c | g | R |
| 4321723 | 19107 | 5 | 58328407 | c/t | g | R |
| 2968016 | 19310 | 5 | 58328610 | c/t | c | Y |
| 5868151 | 20074 | 5 | 58329374 | c/— | c | N |
| 1874858 | 20145 | 5 | 58329445 | t/c | g | R |
| 1874857 | 20281 | 5 | 58329581 | a/c | t | K |
| 7712922 | 23117 | 5 | 58332417 | c/t | t | Y |
| 4631140 | 23585 | 5 | 58332885 | g/a | a | R |
| 4469166 | 23906 | 5 | 58333206 | t/c | t | Y |
| 1078369 | 24046 | 5 | 58333346 | c/g | g | S |
| 1078368 | 24450 | 5 | 58333750 | g/a | c | Y |
| 2968006 | 24619 | 5 | 58333919 | a/g | t | Y |
| 2968005 | 24637 | 5 | 58333937 | g/t | c | M |
| 2936190 | 24894 | 5 | 58334194 | c/t | c | Y |
| 2409613 | 25030 | 5 | 58334330 | g/c | g | S |
| 4415048 | 25732 | 5 | 58335032 | g/c | g | S |
| 2968004 | 27106 | 5 | 58336406 | a/c | g | K |
| 2968003 | 27395 | 5 | 58336695 | g/a | t | Y |
| 2968002 | 28971 | 5 | 58338271 | a/g | c | Y |
| 2936191 | 29755 | 5 | 58339055 | t/a | t | W |
| 1498610 | 30988 | 5 | 58340288 | a/g | g | R |
| 6874662 | 31827 | 5 | 58341127 | c/a | a | M |
| 3060393 | 31843 | 5 | 58341143 | a/aca | a | N |
| 7729722 | 32773 | 5 | 58342073 | g/a | a | R |
| 7733884 | 32787 | 5 | 58342087 | t/c | t | Y |
| 7714489 | 33099 | 5 | 58342399 | t/c | c | Y |
| 7735570 | 36854 | 5 | 58346154 | t/c | c | Y |
| 2936193 | 38026 | 5 | 58347326 | g/t | g | K |
| 2291851 | 38397 | 5 | 58347697 | t/c | c | Y |
| 2291852 | 38680 | 5 | 58347980 | a/g | a | R |
| 1498602 | 39626 | 5 | 58348926 | t/c | t | Y |
| 1995166 | 39682 | 5 | 58348982 | t/c | t | Y |
| 1498603 | 39710 | 5 | 58349010 | g/t | t | K |
| 1498604 | 39745 | 5 | 58349045 | c/a | a | M |
| 1498605 | 39901 | 5 | 58349201 | g/a | g | R |
| 1948651 | 39925 | 5 | 58349225 | c/t | t | Y |
| 4699934 | 40356 | 5 | 58349656 | g/t | t | K |
| 4700319 | 40393 | 5 | 58349693 | c/t | c | Y |
| 2279737 | 41230 | 5 | 58350530 | a/g | a | R |
| 7720361 | 41733 | 5 | 58351033 | c/t | c | Y |
| 7706419 | 41877 | 5 | 58351177 | g/t | g | K |
| 1006431 | 43555 | 5 | 58352855 | t/g | g | K |
| 1353747 | 44066 | 5 | 58353366 | g/t | t | K |
| 1498606 | 44134 | 5 | 58353434 | c/t | c | Y |
| 1353748 | 44181 | 5 | 58353481 | t/g | g | K |
| 1553113 | 45022 | 5 | 58354322 | a/c | a | M |
| 2968012 | 46856 | 5 | 58356156 | t/g | c | M |
| 2968011 | 48231 | 5 | 58357531 | c/a | t | K |
| 1498608 | 49652 | 5 | 58358952 | a/t | t | W |
| 2936189 | 50393 | 5 | 58359693 | t/a | a | W |
| 1498609 | 51103 | 5 | 58360403 | c/t | t | Y |
| 2968019 | 51733 | 5 | 58361033 | t/c | c | Y |
| 6891238 | 54733 | 5 | 58364033 | t/c | t | Y |
| 2968010 | 57173 | 5 | 58366473 | a/t | t | W |
| 2968009 | 58192 | 5 | 58367492 | c/t | g | R |
| 2936203 | 58506 | 5 | 58367806 | g/c | g | S |
| 1498601 | 59572 | 5 | 58368872 | g/a | t | Y |
| 1498600 | 59738 | 5 | 58369038 | a/g | t | Y |
| 1498599 | 61617 | 5 | 58370917 | g/a | t | Y |
| 2936202 | 63980 | 5 | 58373280 | c/g | c | S |
| 7730070 | 64161 | 5 | 58373461 | c/g | g | S |
| 6450501 | 66871 | 5 | 58376171 | a/g | g | R |
| 6450502 | 67063 | 5 | 58376363 | a/t | a | W |
| 6889456 | 67084 | 5 | 58376384 | a/g | a | R |
| 6894618 | 67477 | 5 | 58376777 | c/t | t | Y |
| 7706044 | 69282 | 5 | 58378582 | t/c | t | Y |
| 7707541 | 70363 | 5 | 58379663 | a/t | a | W |
| 7712076 | 70647 | 5 | 58379947 | c/t | t | Y |
| 6892860 | 71834 | 5 | 58381134 | c/t | c | Y |
| 6867053 | 72130 | 5 | 58381430 | c/g | c | S |
| 7737269 | 73495 | 5 | 58382795 | c/t | t | Y |
| 6864156 | 74542 | 5 | 58383842 | t/c | t | Y |
| 950447 | 75280 | 5 | 58384580 | t/c | a | R |
| 2936196 | 80740 | 5 | 58390040 | a/g | g | R |
| 7719347 | 82579 | 5 | 58391879 | t/c | t | Y |
| 1391649 | 82591 | 5 | 58391891 | c/a | a | M |
| 1391650 | 82976 | 5 | 58392276 | t/c | c | Y |
| 1391651 | 83040 | 5 | 58392340 | g/a | a | R |
| 1353749 | 85894 | 5 | 58395194 | g/a | a | R |
| 10682149 | 86020 | 5 | 58395320 | g/gcct | g | N |
| 5868153 | 86947 | 5 | 58396247 | g/ag | g | N |
| 1363882 | 88922 | 5 | 58398222 | c/g | g | S |
| 2409626 | 89662 | 5 | 58398962 | t/c | t | Y |
| 2968018 | 92367 | 5 | 58401667 | g/a | c | Y |
| 954740 | 93154 | 5 | 58402454 | a/g | c | Y |
| 986067 | 94979 | 5 | 58404279 | t/c | c | Y |
| 6869400 | 97598 | 5 | 58406898 | t/c | c | Y |
| 5010782 | 98532 | 5 | 58407832 | t/a | a | W |

[0290] Assay for Verifying and Allelotyping SNPs

[0291] The methods used to verify and allelotype the proximal SNPs of Table 20 are the same methods described in Examples 1 and 2 herein. The primers and probes used in these assays are provided in Table 21 and Table 22, respectively.

TABLE 21

| | | |
|---|---|---|
| DbSNP | | |
| rs# | Forward PCR primer | Reverse PCR primer |

| | | |
|---|---|---|
| 6886495 | AGTTTGCTTCCTGAACAATC | ATGCAGTTGAATCTCAATAC |
| 6450498 | GGACAGCTTTATGTTTAATAC | ACAAATACTCCATTGATGGT |
| 1472456 | GGGAGGTAAGGAATCATGAC | TTTTGAAGGACAAGTTCCCC |
| 4700315 | GGGAACTTGTCCTTCAAAAAG | CATTTTCTGTTACTCTGAGG |
| 4700316 | ATTGTGTCCATGCTTGGCAG | CCTCCTTCTATTGTGGAGAC |
| 7714708 | GCAACATACTAACTGGAATCC | GTTCTTCTGTTTGTCATGTGG |
| 7710479 | TGCTCCAAAAATGGCAATCG | ATTTCTACATCACCAGGGAG |
| 2968013 | CACCCCTAGATTTTGAAGGT | CAATGACACATTCCCTCACC |
| 2968014 | CCTTCCCTCCTTCATTCAAC | TGGATTCAGATTACGGGAGG |
| 2968015 | TGTCAGCTGTATGGTGAAGG | AACGCCAAGCCTATTTTCAG |
| 1391648 | AATTTGGTAAGACAGAGATG | TTGCTCTGTTCCTGAAAGAC |
| 2055297 | AAGCTTTGTTTCTCTTTCTC | AACGATTCTACATCTGCCCC |
| 2055296 | AAGCTTTGTTTCTCTTTCTC | AACGATTCTACATCTGCCCC |
| 3989138 | GCCTTCCCCCTCCTTTAAAA | CATTTCAGGATGAATACTTG |
| 4700317 | TTTTCCTGATATGATGAATG | CTAGTAATGCAGCAATAGTG |
| 2036220 | TGTATCCCAGGACATCTAGC | AACATTCAGGAAATTTCAGG |
| 7727206 | AAGGACTGGGTTTGCATTTC | CTAATCTTGGCAACATTCTG |
| 7723432 | TGAATCTAGGAGTGGATTTG | AGATCTGACCATGGTGATAG |
| 1546221 | GGAAAACTCCTTATGTTGGA | GCTGTATATTATATTACTGTG |
| 4479801 | ACTTCTAGAAGAAAACACAG | TATGCTTCATGCTTTTGTGG |
| 4395595 | AAACCACAAAAGCATGAAGC | TGGCTTGTTGTTCTGTTTTC |
| 4395596 | ATATTCCCTTCTCAAGTCTG | CTGGACTTTACCAAATTTCTC |
| 4699932 | CCATCTTTTCACTGGATTGTC | CAGACTTGAGAAGGGAATATG |
| 2936201 | GCATCTCACTGTGGTTTTAC | CACAATAAGAGGACAATCCAG |
| 7356672 | GACCATCATTAGACATTAGGG | TTAATTTGCTCTGCATCCAG |
| 2936200 | TCACAACTGGGAATTCACTG | GAGCTCCACCATTATTTCCC |
| 1909296 | CCGAGTAGCTGGGATTACAT | TGGTGAAACCCTGTCTCTAC |
| 7703131 | AGAGAAGAAGGCTTCAGACG | TTTAGCTTCTTTGCGATGGG |
| 7445308 | ATACAGCGGTTGGGACTATC | GCACATTGTGCACATGTACC |
| 3087748 | TAGTCCATAGGAATCTGCTG | GCTGCTGTACATTACAACAC |
| 4321723 | GAATTTTACTTGGAACCCTGG | CCTATCTTACTACTGAACTC |
| 2968016 | GTAAACCTTGGACTTATGGG | ACGATGTTACCCTCTTTTCC |
| 5868151 | TAGAATAGACTACATCCATC | GGATAAGGAAGTTTCTTAGG |
| 1874858 | GCCTAAGAAACTTCCTTATCC | ATATTGCCAACTAGGAGTAC |
| 1874857 | ATGAAGACTTTACTGAAGGC | CATACACTACTAACCTGTTGC |
| 7712922 | CTCTTTCTAAGGGCTTCTGG | AGAGGAGTCGGACTTTGTTC |
| 4631140 | TTGAAGTTGAGAGGGTCTCC | AAGCAAAGCACAAGCAACAG |
| 4469166 | TTAGGAGGGATGAGGAATGG | CTCCAATTGCACTGGGTTAC |
| 1078369 | TCCCTGAGCCTCTGTTTTCC | ATATGTCCCCACCACACTAC |
| 1078368 | ATGACTCATGGAGGCAACAG | GGAGAGCGATTTATGGATGG |
| 2968006 | CAGGGTTCATTTGGTGAAAC | ACTGACCTGTCTGGGATTTC |
| 2968005 | ACTGACCTGTCTGGGATTTC | CGCAGGGTTCATTTGGTGAA |
| 2936190 | AACAGACCTCCAACACAACC | TAGGATAAACTCACGGAAGG |
| 2409613 | AATAGGGTCAGTGGGATGAG | CCCACCTCCAAATCCTTTAC |
| 4415048 | CACCCAGCCTCAGAATATTT | TTCCCCACCAATACAACATC |
| 2968004 | CCCAAACATTATCTTCTGGC | GATCTCCATAAGGGTAAGTG |
| 2968003 | ACAAGAGGACAAGTGTTTAG | GGCCAGAGCTGTTCATAAAT |
| 2968002 | CCTTTGACTTTCCACAGAAC | ACACTCACTGGGTTGGGCTA |
| 2936191 | TGACCTTGATAACCTGGCTG | AGCTGTGCATATTGACTTCC |
| 1498610 | CATTAAATCACCACAGCAAC | TCCTTAGGCAGAATGGTC |
| 6874662 | ACTCTAGCCTGGGCAACAGA | ATGTCTTGTAGTTTCCAGTG |
| 3060393 | CCAGTGTATAGATCTTTCACC | AGAGCGAGACTCCATCACAA |
| 7729722 | GAGGAAAGTGTGTCTATTCAG | CCATACATCTGATAAGAGGC |
| 7733884 | TGTATCTCTGTTGGCCATTC | CCATACATCTGATAAGAGGC |
| 7714489 | AGGGTCTTGCTCTTTTGTTC | ATTGAGCCCGAGAATTTGAG |
| 7735570 | AGGATCTTCATAGAAGTGGC | AACTGAGGCTGTTTTCTCTC |
| 2936193 | CTTAGCATACAATGGGCACC | ACAGTGCCTACTATTGTCAG |
| 2291851 | GTTTCTTGCTTGTTGATGGC | TAGCCTTGGCCAAGAATTCA |
| 2291852 | ATCCTGATCTCTTACTAGTG | TTCTGTGTTCTCTCTTGAGG |
| 1498602 | CAGTAGTTTTTCAGCTAAATG | ATCCAAACATAGATCTCAAC |
| 1995166 | GCCACTTAGCAATGTGCAAG | GGGAAAGTAACTAGCTGCTC |
| 1498603 | GTGTGGTTGATTCTGTGTAAG | ACTACTGTCGAATCACCTTG |
| 1498604 | GCTTGCACATTGCTAAGTGG | CCATGGGCCTGAGTTCTTAA |
| 1498605 | CTGTGGCATTAGGCACCTTT | AGGACACTGGACATATTCAG |
| 1948651 | CAGATGAGAATAAAGGTGCC | TATTGCTCTCTTACTGGGAC |
| 4699934 | AGGACTGGTAATGTTGTGAG | GACCTTGTAAATAGGTGGCC |
| 4700319 | GACCTTGTAAATAGGTGGCC | GCTGAAGGATTCAGCCAGTA |
| 2279737 | AAAACCTCTCAATTTATTTC | ATGGCCTCCAACAAGGTAAG |
| 7720361 | ACTATGCGACTTTTCAACTG | ACCCCCTCGCCATCCGCTA |
| 7706419 | ACCCGGCCGCGGCTGATTCAT | GCCCCGCCTGCCGAGCCTT |
| 1006431 | CCTTGCCAGGTGAATTAAAG | CTATACAGAGCAGGTATTTT |
| 1353747 | TGAGAAAGTTGGAGTGCAGG | AATCATTGGTTACAATGAAG |
| 1498606 | ACTCCAACTTTCTCAAAGCC | TTGGTGAAGATGGAGGAAGG |
| 1353748 | CTCCATCTTCACCAAGTTCC | GAAATATAATGTGTGGAGCC |
| 1553113 | AGCCTTTAGGGAGTTTAGCC | GCACCAAATCTTGCTAAGTC |
| 2968012 | CAGTTCTATCTACTGTAGAC | CAGTTCCAGCTTCTCTTCTC |
| 2968011 | ATAATGGTTGCACTGACTTC | ACTGTGTGACATGGGATCTG |
| 1498608 | GAATCCCTGTTCATTCCTTG | ATAACCTCGGGGTCCAGAAA |
| 2936189 | TGATCTCAGACTTCCAGCTC | TTTGTCTTAGCTCAAGCTGC |
| 1498609 | TAGCTCAACTGTTCTTCAGG | CAGAGTGAGTGTAAATATAC |
| 2968019 | CCCAGGCCAGTATTACTGTT | TGACATTTACAGGCACTCAG |
| 6891238 | CCTTTATTCAGGCTGCAGAC | TGTGGTTTTAATGGCTGTGG |
| 2968010 | ATGTATGATTCACTCTGATG | CAAACCAATTGGTAGATTTC |
| 2968009 | GTAGGCAAAGATGAATCACG | TGTTTTACCTAGCAAGGAGC |
| 2936203 | AGTTCAGAGGTTCCAGACAG | AGCCAAGCTTGCAAACTCTG |
| 1498601 | TTGGTTAGATCCAGCTCTGC | TAAGAGGAACAGGGATCTGC |
| 1498600 | ATATAGGTACTGCTTTCTCC | CCTTGTTTCCAAATCTGAGC |
| 1498599 | GGAACATTTGGCTACATCATG | CCACAGAGCTGATTTAATTTC |
| 2936202 | TGTAAGAGGAGGGTGTGATG | TGACTCTGCAGGACTGTCTG |
| 7730070 | AAATATACTTGGGTAGAGAG | GATAGCTAACACATTTCTGAC |
| 6450501 | AGCTAGACTACATAGCCTCC | TGTAGGACATGACAGCAAAC |
| 6450502 | TAACAAGTCAAAACAGATGG | ATTTTCAATATTCTGCACAC |
| 6889456 | GGATCTCTATTAAACCTCTC | TTCAAGGGTTACTGATACTC |
| 6894618 | CCATCAACAGATGAATGGAC | TCCTTCCTTTTTTAGGGCTG |
| 7706044 | GACTTGGTATTTTGTGAGGG | TCCACCATGTGAGGACAAAG |
| 7707541 | TTTTGAGTCATGAAAAACTG | CACATGTATTAATTAAGTAGG |
| 7712076 | AAGCCATACCACAAGCATTC | GTTCACGTGAAATACACTACC |
| 6892860 | CAGAAGATGCAATGAAAAGAC | AGAACAAAATGTTAGGACGC |
| 6867053 | TTATCCGCATTCCACTCTTG | ACACTGGTCCTCATAACAAG |
| 7737269 | TTTAAAGGCTCGCACCTCAG | TCCGAAGGAAAGTGATTCTC |
| 6864156 | GTTGGATCATCAAAAAGTGG | GGCTAGAGTACTAAAAATCAG |
| 950447 | GTGAGTAGTCTGAATTTGTC | AGGCTTCAGAATCGGTCATC |
| 2936196 | CTCCAAAACATAGTAAGTGC | TGAACATTTAGAATTAGGGG |
| 7719347 | ACATTCTGAGGTCATGCAGG | CTCAGAGCCTGCATTATCTC |
| 1391649 | GCTAATGCTTTACTCTGGTC | CACACTCCAAAATGTGCAAC |
| 1391650 | TTCAGCTGATACTTGCTCCC | CTCTACCTACCAACATCGTC |
| 1391651 | TTGACGTGATAGAAGTTTGG | CTGAAAAGGGTGGCTTTCTC |
| 1353749 | TATAGAGCAAAAAGCCAAGG | CCACTTCTACCACATTCTTC |
| 10682149 | GGGAGAATATAACCATTAAGT | GAATTGCATTTTATCCAATC |
| 5868153 | CATAGGGACTATTTAAACTTC | GAGTGTTCTTTAGAGATTAAG |
| 1363882 | CTCACACAGGCAATGAGTAG | AGCCACTACTTCTCAATCTC |
| 2409626 | CCTGGTCTCAAGCAATCATC | ATAAGGCCAGATGTGGTGAC |
| 2968018 | GCAGAGAGATGAGAGGAAAC | CCTCATATCTAATCTCTCCC |
| 954740 | ATACTTGGGAGCACTCAACG | CAACAAGACGGAATCCAAAG |
| 986067 | CTACAAATTGCTTAAGCAGGG | TGATAGAGTAGAGAGACTCC |
| 6869400 | ACAAGATCGTTGAATGGTGG | GACTTTGTATACTGCCACTC |
| 5010782 | AATCTGTGGGAGTTAGTGGT | TTCCTCATCCTCATCTTCCC |

[0292] TABLE 22

| | | |
|---|---|---|
| dbSNP | Extend | Term |
| rs# | Primer | Mix |

| | | |
|---|---|---|
| 6886495 | CCTGAACAATCTTAAATGC | ACT |
| 6450498 | GTCTTATGCATTTTGAAGG | CGT |
| 1472456 | GGAATCATGACTACTTGGA | ACG |
| 4700315 | GAAACAAAGCAAACGAC | ACT |
| 4700316 | TGCTTGGCAGGCTTTTT | ACT |
| 7714708 | CAGTATAAGTAATTTGGCCC | ACT |
| 7710479 | GAGCATTTTAATTGCTTCC | ACG |
| 2968013 | AGCTGAGAGCAGCCATG | ACT |
| 2968014 | GAGCTGTTTCTTTCAGTTT | ACT |
| 2968015 | ATGGTGAAGGTGGAGGA | ACT |
| 1391648 | TCAGCTGTATGGTGAAG | ACT |
| 2055297 | GTGCCTGACATAGAGTAG | ACT |
| 2055296 | GGCAGTGCCTGACATAG | ACT |
| 3989138 | CCCCTCCTTTAAAAAAAAAAA | CGT |
| 4700317 | CAAATGTAACAAAGTGCCA | ACG |
| 2036220 | GCCTCCCTGGCCTCTGC | ACG |
| 7727206 | AATCCTGTCACCTATGG | CGT |
| 7723432 | GTGCCTTGAATTAAAGAATC | ACT |
| 1546221 | CTTATGTTGGAGAGGTC | ACG |
| 4479801 | TAGAAAGTAGTTGTGATCTTG | ACG |
| 4395595 | AAAAATGGTATACTGGACTTTA | ACG |
| 4395596 | CTGTGGCTTGTTGTTCT | ACT |
| 4699932 | CACTGGATTGTCCTCTTA | ACG |
| 2936201 | CCTAATGTCTAATGATGGTC | ACT |
| 7356672 | CACAGTGAGATGCCACA | ACG |
| 2936200 | CTTGGATAACTGTATGCCT | ACT |
| 1909296 | TTACATGAGTGCACCAC | CGT |
| 7703131 | GGTAATAAACTTTTCCGAG | ACT |
| 7445308 | GTTGGGACTATCTACTTTTTT | CGT |
| 3087748 | CATAGGAATCTGCTGCCTCAC | ACT |
| 4321723 | ACTTGGAACCCTGGTATTTT | ACG |
| 2968016 | GGGGCAAAAAGACAATAAA | ACG |
| 5868151 | GAATAGACTACATCCATCAAAATA | ACG |
| 1874858 | GAAACTTCCTTATCCAAGGCC | ACT |
| 1874857 | GCAATTAAAAGTGGTACAATAA | ACT |
| 7712922 | CAATAAAAGGAAAGAGACTTC | ACG |
| 4631140 | AGAGGGTCTCCTGTAGG | ACG |
| 4469166 | GAGGAATGGAACTATTTTTAAAC | ACT |
| 1078369 | CTCTGTTTTCCCTGTAAAT | ACT |
| 1078368 | GCAACAGGTGAAGCTGA | ACG |
| 2968006 | GACTGAACCTTTAGGAGA | ACT |
| 2968005 | TTCTCCTAAAGGTTCAGT | CGT |
| 2936190 | CCAACACAACCTCTTAA | ACG |
| 2409613 | CCAAGTGACTAAAGCAGAT | ACT |
| 4415048 | AAAACCTAATGCTCAGTTAAA | ACT |
| 2968004 | TCTGGCATAAAGTAAACTAATC | ACT |
| 2968003 | GGGGACTAGTCAACAAA | ACG |
| 2968002 | TCTGATGAGGTCTTCTAC | ACT |
| 2936191 | GGCTGAAGTAGTGATAGG | CGT |
| 1498610 | GAAGCACAGAAGGCAAC | ACT |
| 6874662 | CAGAGCGAGACTCCATC | CGT |
| 3060393 | GATTTGCTCCTAAGTTTTTT | ACT |
| 7729722 | GTGTCTATTCAGATCCTTTG | ACG |
| 7733884 | TTGAGGAAAGTGTGTCT | ACT |
| 7714489 | GGCTGGAGTGCAGTGGC | ACT |
| 7735570 | TCCACATTATGCAACTACA | ACT |
| 2936193 | AAAAGTCAGTGTAAGAGTTC | CGT |
| 2291851 | TGATGGCATTGAAGCAG | ACT |
| 2291852 | GTTTTTATTGTGCTTTTCAATCT | ACT |
| 1498602 | GAATTTGAGCAGCTAGTT | ACT |
| 1995166 | TGTGCAAGCATTAGTGTAT | ACT |
| 1498603 | GAGCAGAATCAAAAGCC | CGT |
| 1498604 | GCTCTTCATTTTCTTACACAG | CGT |
| 1498605 | AGGCACCTTTATTCTCAT | ACG |
| 1948651 | GAATAAAGGTGCCTAATGC | ACG |
| 4699934 | GTAATAGTTGCCTCGTC | CGT |
| 4700319 | TTACTAATTGTCTCACAACATTA | ACG |
| 2279737 | TCGCCGGCATGGGAATC | ACT |
| 7720361 | AGTCCCAGTCCAGGAGC | ACG |
| 7706419 | TTCATTCACTTCAAGTGC | CGT |
| 1008431 | GTGAATTAAAGTTTCAGATTGAA | ACT |
| 1353747 | GGAGAGGAGCCACAGAA | CGT |
| 1498606 | CAAGTGATTTCCCAGTAG | ACG |
| 1353748 | ACCAAGTTCCCAAAGCT | ACT |
| 1553113 | GGAGTTTAGCCAATAGTTTTTGC | ACT |
| 2968012 | GACAGTATCAATTCCTTCC | ACT |
| 2968011 | TGACTTCAACTTTACTTTCTT | CGT |
| 1498608 | CCCTAAAAACTGTTCCAGGTA | CGT |
| 2936189 | CCAGAACTGTGAGAAATAAA | CGT |
| 1498609 | GTTTTCTATTTGAAATTGAGGTAT | ACG |
| 2968019 | CCAGTATTACTGTTTGAATCTC | ACT |
| 6891238 | CTGCAGACATTTCCTAC | ACT |
| 2968010 | TTCACTCTGATGTTTTCTATTT | CGT |
| 2968009 | CATAACCTCTGGTTTCC | ACG |
| 2936203 | GGAGGATATCCATGCCCC | ACT |
| 1498601 | AGCTCTGCCTCCCCCATTT | ACG |
| 1498600 | AGGTGCCAAGCTAGTCA | ACT |
| 1498599 | GGCTACATCATGTTTTGG | ACG |
| 2936202 | CCCTGGTAACTGTAGTG | ACT |
| 7730070 | TAGGCATGCTCAAACTC | ACT |
| 6450501 | GCCTCCTAAAAAAGCAC | ACT |
| 6450502 | GTTTAATGACATTTTAGAGAGG | CGT |
| 6889456 | AACCTCTCTAAAATGTCATTAA | ACT |
| 6894618 | GGACAAAGGAAATGTGATATATA | ACG |
| 7706044 | GGCTCATTTCCTGGGTC | ACT |
| 7707541 | GAAAAACTGACAACATATGAG | CGT |
| 7712076 | CCCAGAGGATATAGATTTCAT | ACG |
| 6892860 | GGATATTTCAGTGGTGCT | ACG |
| 6867053 | CACCATTAACCTGGTCTA | ACT |
| 7737269 | ACTCTTGATCAATAGTTTGG | ACG |
| 6864156 | GTAGTTGACAAATCTTACCT | ACT |
| 950447 | TTGTTAGTGTATTAGCCATTG | ACT |
| 2936196 | GTGCAAAGATCAATCACA | ACT |
| 7719347 | GGTCATGCAGGAAATAG | ACT |
| 1391649 | TCTGGTCTATTTCCTGC | CGT |
| 1391650 | CCCACAGGTTTTTCACA | ACT |
| 1391651 | GGGCCCCCGTTTTGCCCTG | ACG |
| 1353749 | CAAAAAGCCAAGGATATAAAATA | ACG |
| 10682149 | GTATGATCTGATTTCCATAAATAG | ACT |
| 5868153 | GAAATGAATAAATGGCAAAAAA | ACT |
| 1363882 | GCAATGAGTAGACTAAAAAAA | ACT |
| 2409626 | AGCAATCATCCCACCTC | ACT |
| 2968018 | CAGACACCCACTGACCA | ACG |
| 954740 | ACGAAGGTCCCGTCTGA | ACT |
| 986067 | CAGGGATTTAAAATGAAACC | ACT |
| 6869400 | AATGGTGGGTCATTAGTT | ACT |
| 5010782 | GCACCTACAGAGGAAAT | CGT |

[0293] Genetic Analysis

[0294] Allelotyping results are shown for female cases and controls in Table 23. The allele frequency for the A2 allele is noted in the fifth and sixth columns for control pools and case pools, respectively, where “AF” is allele frequency. Some SNPs do not have an allele frequency disclosed because of failed assays.

TABLE 23

| | Position in | | | | | | | Low BMD |
|---|---|---|---|---|---|---|---|---|
| dbSNP | SEQ ID | Chromosome | A1/A2 | Control AF | Case AF | | | Associated |
| rs# | NO: 4 | Position | Allele | (High BMD) | (Low BMD) | p-Value | OR | Allele |
| 6886495 | 249 | 58309549 | G/C | G = | G = 0.87 | | | |
| | | | | C = | C = 0.13 | | | |
| 6450498 | 543 | 58309843 | A/T | A = 0.81 | A = 0.85 | 0.1780 | 1.29 | A |
| | | | | T = 0.19 | T = 0.15 | | | |
| 1472456 | 973 | 58310273 | G/A | G = 1.00 | G = 1.00 | | | |
| | | | | A = 0.00 | A = 0.00 | | | |
| 4700315 | 1076 | 58310376 | A/G | A = | A = 0.95 | | | |
| | | | | G = | G = 0.05 | | | |
| 4700316 | 1276 | 58310576 | G/C | G = 0.87 | G = 0.84 | 0.1520 | 0.75 | C |
| | | | | C = 0.13 | C = 0.16 | | | |
| 7714708 | 1599 | 58310899 | A/G | A = 0.35 | A = 0.46 | 0.0013 | 1.60 | A |
| | | | | G = 0.65 | G = 0.54 | | | |
| 7710479 | 2755 | 58312055 | C/T | C = 1.00 | C = 1.00 | | | |
| | | | | T = 0.00 | T = 0.00 | | | |
| 2968013 | 2911 | 58312211 | G/C | G = 0.84 | G = 0.80 | 0.1256 | 0.79 | C |
| | | | | C = 0.16 | C = 0.20 | | | |
| 2968014 | 4466 | 58313766 | A/G | A = 0.22 | A = 0.25 | 0.2834 | 1.16 | A |
| | | | | G = 0.78 | G = 0.75 | | | |
| 2968015 | 5754 | 58315054 | T/C | T = 0.88 | T = 0.86 | 0.2038 | 0.80 | C |
| | | | | C = 0.12 | C = 0.14 | | | |
| 1391648 | 5762 | 58315062 | A/G | A = 0.25 | A = 0.24 | 0.8566 | 0.97 | G |
| | | | | G = 0.75 | G = 0.76 | | | |
| 2055297 | 5967 | 58315267 | A/G | A = 0.00 | A = 0.00 | | | |
| | | | | G = 1.00 | G = 1.00 | | | |
| 2055296 | 5972 | 58315272 | A/G | A = 0.94 | A = 0.94 | 0.8857 | 1.04 | A |
| | | | | G = 0.06 | G = 0.06 | | | |
| 3989138 | 6390 | 58315690 | —/AA | — = 0.53 | — = 0.50 | 0.3703 | 0.90 | A |
| | | | | AA = 0.47 | AA = 0.50 | | | |
| 4700317 | 6984 | 58316284 | C/T | C = 0.00 | C = 0.00 | | | |
| | | | | T = 1.00 | T = 1.00 | | | |
| 2036220 | 7234 | 58316534 | G/A | G = 0.44 | G = 0.44 | 0.9272 | 1.01 | G |
| | | | | A = 0.56 | A = 0.56 | | | |
| 7727206 | 8196 | 58317496 | G/T | G = 0.27 | G = 0.25 | 0.3954 | 0.89 | T |
| | | | | T = 0.73 | T = 0.75 | | | |
| 7723432 | 8369 | 58317669 | A/G | A = 0.82 | A = 0.82 | 0.7671 | 1.05 | A |
| | | | | G = 0.18 | G = 0.18 | | | |
| 1546221 | 9565 | 58318865 | C/T | C = 0.83 | C = 0.84 | 0.7282 | 1.06 | C |
| | | | | T = 0.17 | T = 0.16 | | | |
| 4479801 | 11084 | 58320384 | C/T | C = 0.86 | C = 0.87 | 0.7440 | 1.07 | C |
| | | | | T = 0.14 | T = 0.13 | | | |
| 4395595 | 11153 | 58320453 | C/T | C = 0.93 | C = 0.93 | 0.7241 | 1.09 | C |
| | | | | T = 0.07 | T = 0.07 | | | |
| 4395596 | 11187 | 58320487 | T/C | T = 0.01 | T = 0.02 | | | |
| | | | | C = 0.99 | C = 0.98 | | | |
| 4699932 | 11290 | 58320590 | G/A | G = 0.13 | G = 0.10 | 0.1440 | 0.76 | A |
| | | | | A = 0.87 | A = 0.90 | | | |
| 2936201 | 11386 | 58320686 | A/G | A = 0.17 | A = 0.19 | 0.3609 | 1.15 | A |
| | | | | G = 0.83 | G = 0.81 | | | |
| 7356672 | 11441 | 58320741 | C/T | C = 0.88 | C = 0.89 | 0.4757 | 1.17 | C |
| | | | | T = 0.12 | T = 0.11 | | | |
| 2936200 | 12373 | 58321673 | A/G | A = 1.00 | A = 1.00 | | | |
| | | | | G = 0.00 | G = 0.00 | | | |
| 1909296 | 12602 | 58321902 | C/A | C = 0.98 | C = 0.99 | | | |
| | | | | A = 0.02 | A = 0.01 | | | |
| 7703131 | 13763 | 58323063 | C/G | C = | C = | | | |
| | | | | G = | G = | | | |
| 7445308 | 18697 | 58327997 | A/T | A = 0.00 | A = 0.00 | | | |
| | | | | T = 1.00 | T = 1.00 | | | |
| 3087748 | 18854 | 58328154 | T/C | T = | T = 0.21 | | | |
| | | | | C = | C = 0.79 | | | |
| 4321723 | 19107 | 58328407 | C/T | C = 0.19 | C = 0.24 | 0.1033 | 1.30 | C |
| | | | | T = 0.81 | T = 0.76 | | | |
| 2968016 | 19310 | 58328610 | C/T | C = 0.45 | C = 0.44 | 0.7959 | 0.96 | T |
| | | | | T = 0.55 | T = 0.56 | | | |
| 5868151 | 20074 | 58329374 | C/— | C = 0.44 | C = 0.43 | 0.6659 | 0.95 | — |
| | | | | — = 0.56 | — = 0.57 | | | |
| 1874858 | 20145 | 58329445 | T/C | T = 0.12 | T = 0.17 | 0.1558 | 1.43 | T |
| | | | | C = 0.88 | C = 0.83 | | | |
| 1874857 | 20281 | 58329581 | A/C | A = 0.96 | A = 0.96 | 0.5485 | 0.83 | A |
| | | | | C = 0.04 | C = 0.04 | | | |
| 7712922 | 23117 | 58332417 | C/T | C = 0.05 | C = 0.00 | | | |
| | | | | T = 0.95 | T = 1.00 | | | |
| 4631140 | 23585 | 58332885 | G/A | G = 0.10 | G = 0.09 | 0.4903 | 0.87 | A |
| | | | | A = 0.90 | A = 0.91 | | | |
| 4469166 | 23906 | 58333206 | T/C | T = 0.97 | T = 0.98 | 0.6510 | 1.30 | T |
| | | | | C = 0.03 | C = 0.02 | | | |
| 1078369 | 24046 | 58333346 | C/G | C = 0.88 | C = 0.88 | 0.8279 | 0.96 | C |
| | | | | G = 0.12 | G = 0.12 | | | |
| 1078368 | 24450 | 58333750 | G/A | G = 0.50 | G = 0.47 | 0.3033 | 0.89 | A |
| | | | | A = 0.50 | A = 0.53 | | | |
| 2968006 | 24619 | 58333919 | A/G | A = 0.34 | A = 0.35 | 0.5216 | 1.08 | A |
| | | | | G = 0.66 | G = 0.65 | | | |
| 2968005 | 24637 | 58333937 | G/T | G = 0.37 | G = 0.36 | 0.7332 | 0.96 | T |
| | | | | T = 0.63 | T = 0.64 | | | |
| 2936190 | 24894 | 58334194 | C/T | C = 0.22 | C = 0.22 | 0.9071 | 1.02 | C |
| | | | | T = 0.78 | T = 0.78 | | | |
| 2409613 | 25030 | 58334330 | G/C | G = 1.00 | G = 1.00 | | | |
| | | | | C = 0.00 | C = 0.00 | | | |
| 4415048 | 25732 | 58335032 | G/C | G = 0.94 | G = 0.96 | 0.2666 | 1.36 | G |
| | | | | C = 0.06 | C = 0.04 | | | |
| 2968004 | 27106 | 58336406 | A/C | A = 0.92 | A = 0.88 | 0.1210 | 0.70 | C |
| | | | | C = 0.08 | C = 0.12 | | | |
| 2968003 | 27395 | 58336695 | G/A | G = 0.61 | G = 0.66 | 0.2364 | 1.23 | G |
| | | | | A = 0.39 | A = 0.34 | | | |
| 2968002 | 28971 | 58338271 | A/G | A = 0.81 | A = 0.81 | 0.8196 | 1.04 | A |
| | | | | G = 0.19 | G = 0.19 | | | |
| 2936191 | 29755 | 58339055 | T/A | T = 1.00 | T = 1.00 | | | |
| | | | | A = 0.00 | A = 0.00 | | | |
| 1498610 | 30988 | 58340288 | A/G | A = 0.00 | A = 0.00 | | | |
| | | | | G = 1.00 | G = 1.00 | | | |
| 6874662 | 31827 | 58341127 | C/A | C = 0.00 | C = 0.00 | | | |
| | | | | A = 1.00 | A = 1.00 | | | |
| 3060393 | 31843 | 58341143 | —/CA | — = 1.00 | — = 1.00 | | | |
| | | | | CA = 0.00 | CA = 0.00 | | | |
| 7729722 | 32773 | 58342073 | G/A | G = 0.01 | G = 0.01 | | | |
| | | | | A = 0.99 | A = 0.99 | | | |
| 7733884 | 32787 | 58342087 | T/C | T = 0.96 | T = 0.97 | 0.5282 | 1.26 | T |
| | | | | C = 0.04 | C = 0.03 | | | |
| 7714489 | 33099 | 58342399 | T/C | T = 0.15 | T = 0.14 | 0.7668 | 0.95 | C |
| | | | | C = 0.85 | C = 0.86 | | | |
| 7735570 | 36854 | 58346154 | T/C | T = 0.08 | T = 0.09 | 0.4593 | 1.18 | T |
| | | | | C = 0.92 | C = 0.91 | | | |
| 2936193 | 38026 | 58347326 | G/T | G = 0.25 | G = 0.28 | 0.3638 | 1.14 | G |
| | | | | T = 0.75 | T = 0.72 | | | |
| 2291851 | 38397 | 58347697 | T/C | T = 0.05 | T = 0.06 | 0.2114 | 1.40 | T |
| | | | | C = 0.95 | C = 0.94 | | | |
| 2291852 | 38680 | 58347980 | A/G | A = 0.98 | A = 0.98 | | | |
| | | | | G = 0.02 | G = 0.02 | | | |
| 1498602 | 39626 | 58348926 | T/C | T = 0.67 | T = 0.61 | 0.0496 | 0.77 | C |
| | | | | C = 0.33 | C = 0.39 | | | |
| 1995166 | 39682 | 58348982 | T/C | T = 0.54 | T = 0.55 | 0.7840 | 1.03 | T |
| | | | | C = 0.46 | C = 0.45 | | | |
| 1498603 | 39710 | 58349010 | G/T | G = 0.03 | G = 0.02 | | | |
| | | | | T = 0.97 | T = 0.98 | | | |
| 1498604 | 39745 | 58349045 | C/A | C = 0.16 | C = 0.13 | 0.2329 | 0.79 | A |
| | | | | A = 0.84 | A = 0.87 | | | |
| 1498605 | 39901 | 58349201 | G/A | G = 0.88 | G = 0.89 | 0.3713 | 1.18 | G |
| | | | | A = 0.12 | A = 0.11 | | | |
| 1948651 | 39925 | 58349225 | C/T | C = 0.58 | C = 0.56 | 0.5199 | 0.93 | T |
| | | | | T = 0.42 | T = 0.44 | | | |
| 4699934 | 40356 | 58349656 | G/T | G = 0.13 | G = 0.05 | 0.0043 | 0.35 | T |
| | | | | T = 0.87 | T = 0.95 | | | |
| 4700319 | 40393 | 58349693 | C/T | C = | C = 0.98 | | | |
| | | | | T = | T = 0.02 | | | |
| 2279737 | 41230 | 58350530 | A/G | A = 0.82 | A = 0.80 | 0.3520 | 0.87 | G |
| | | | | G = 0.18 | G = 0.20 | | | |
| 7720361 | 41733 | 58351033 | C/T | C = 1.00 | C = 1.00 | | | |
| | | | | T = 0.00 | T = 0.00 | | | |
| 7706419 | 41877 | 58351177 | G/T | G = 0.89 | G = 0.92 | 0.1509 | 1.38 | G |
| | | | | T = 0.11 | T = 0.08 | | | |
| 1006431 | 43555 | 58352855 | T/G | T = 0.22 | T = 0.30 | 0.0077 | 1.49 | T |
| | | | | G = 0.78 | G = 0.70 | | | |
| 1353747 | 44066 | 58353366 | G/T | G = 0.23 | G = 0.15 | 0.0025 | 0.61 | T |
| | | | | T = 0.77 | T = 0.85 | | | |
| 1498606 | 44134 | 58353434 | C/T | C = 0.85 | C = 0.87 | 0.3475 | 1.17 | C |
| | | | | T = 0.15 | T = 0.13 | | | |
| 1353748 | 44181 | 58353481 | T/G | T = 0.65 | T = 0.66 | 0.8645 | 1.02 | T |
| | | | | G = 0.35 | G = 0.34 | | | |
| 1553113 | 45022 | 58354322 | A/C | A = 0.95 | A = 0.97 | 0.1730 | 1.54 | A |
| | | | | C = 0.05 | C = 0.03 | | | |
| 2968012 | 46856 | 58356156 | T/G | T = 0.66 | T = 0.66 | 0.9069 | 1.01 | T |
| | | | | G = 0.34 | G = 0.34 | | | |
| 2968011 | 48231 | 58357531 | C/A | C = 0.67 | C = | | | |
| | | | | A = 0.33 | A = | | | |
| 1498608 | 49652 | 58358952 | A/T | A = 0.19 | A = 0.13 | 0.0118 | 0.64 | T |
| | | | | T = 0.81 | T = 0.87 | | | |
| 2936189 | 50393 | 58359693 | T/A | T = 0.63 | T = 0.65 | 0.6021 | 1.08 | T |
| | | | | A = 0.37 | A = 0.35 | | | |
| 1498609 | 51103 | 58360403 | C/T | C = 0.34 | C = 0.40 | 0.0314 | 1.30 | C |
| | | | | T = 0.66 | T = 0.60 | | | |
| 2968019 | 51733 | 58361033 | T/C | T = 0.62 | T = 0.64 | 0.5417 | 1.08 | T |
| | | | | C = 0.38 | C = 0.36 | | | |
| 6891238 | 54733 | 58364033 | T/C | T = 1.00 | T = 1.00 | | | |
| | | | | C = 0.00 | C = 0.00 | | | |
| 2968010 | 57173 | 58366473 | A/T | A = 0.90 | A = 0.95 | 0.0012 | 2.28 | A |
| | | | | T = 0.10 | T = 0.05 | | | |
| 2968009 | 58192 | 58367492 | C/T | C = 0.65 | C = 0.70 | 0.0959 | 1.24 | C |
| | | | | T = 0.35 | T = 0.30 | | | |
| 2936203 | 58506 | 58367806 | G/C | G = 0.17 | G = 0.14 | 0.1730 | 0.80 | C |
| | | | | C = 0.83 | C = 0.86 | | | |
| 1498601 | 59572 | 58368872 | G/A | G = 0.81 | G = 0.78 | 0.3899 | 0.83 | A |
| | | | | A = 0.19 | A = 0.22 | | | |
| 1498600 | 59738 | 58369038 | A/G | A = 0.48 | A = 0.46 | 0.5991 | 0.94 | G |
| | | | | G = 0.52 | G = 0.54 | | | |
| 1498599 | 61617 | 58370917 | G/A | G = 0.69 | G = 0.69 | 0.9739 | 1.00 | G |
| | | | | A = 0.31 | A = 0.31 | | | |
| 2936202 | 63980 | 58373280 | C/G | C = 0.20 | C = 0.14 | 0.0286 | 0.68 | G |
| | | | | G = 0.80 | G = 0.86 | | | |
| 7730070 | 64161 | 58373461 | C/G | C = 0.74 | C = 0.73 | 0.5744 | 0.93 | G |
| | | | | G = 0.26 | G = 0.27 | | | |
| 6450501 | 66871 | 58376171 | A/G | A = 0.00 | A = 0.09 | | | |
| | | | | G = 1.00 | G = 0.91 | | | |
| 6450502 | 67063 | 58376363 | A/T | A = 1.00 | A = 1.00 | | | |
| | | | | T = 0.00 | T = 0.00 | | | |
| 6889456 | 67084 | 58376384 | A/G | A = | A = 1.00 | | | |
| | | | | G = | G = 0.00 | | | |
| 6894618 | 67477 | 58376777 | C/T | C = 0.69 | C = 0.73 | 0.1542 | 1.21 | C |
| | | | | T = 0.31 | T = 0.27 | | | |
| 7706044 | 69282 | 58378582 | T/C | T = | T = 1.00 | | | |
| | | | | C = | C = 0.00 | | | |
| 7707541 | 70363 | 58379663 | A/T | A = 0.63 | A = 0.61 | 0.5874 | 0.93 | T |
| | | | | T = 0.37 | T = 0.39 | | | |
| 7712076 | 70647 | 58379947 | C/T | C = 0.00 | C = 0.00 | | | |
| | | | | T = 1.00 | T = 1.00 | | | |
| 6892860 | 71834 | 58381134 | C/T | C = 0.81 | C = 0.83 | 0.4091 | 1.14 | C |
| | | | | T = 0.19 | T = 0.17 | | | |
| 6867053 | 72130 | 58381430 | C/G | C = 0.46 | C = 0.44 | 0.4563 | 0.91 | G |
| | | | | G = 0.54 | G = 0.56 | | | |
| 7737269 | 73495 | 58382795 | C/T | C = 0.00 | C = 0.00 | | | |
| | | | | T = 1.00 | T = 1.00 | | | |
| 6864156 | 74542 | 58383842 | T/C | T = 0.99 | T = 0.99 | | | |
| | | | | C = 0.01 | C = 0.01 | | | |
| 950447 | 75280 | 58384580 | T/C | T = | T = 1.00 | | | |
| | | | | C = | C = 0.00 | | | |
| 2936196 | 80740 | 58390040 | A/G | A = 0.00 | A = 0.00 | | | |
| | | | | G = 1.00 | G = 1.00 | | | |
| 7719347 | 82579 | 58391879 | T/C | T = 1.00 | T = 1.00 | | | |
| | | | | C = 0.00 | C = 0.00 | | | |
| 1391649 | 82591 | 58391891 | C/A | C = 0.42 | C = 0.35 | 0.0162 | 0.74 | A |
| | | | | A = 0.58 | A = 0.65 | | | |
| 1391650 | 82976 | 58392276 | T/C | T = 0.75 | T = 0.75 | 0.9568 | 0.99 | T |
| | | | | C = 0.25 | C = 0.25 | | | |
| 1391651 | 83040 | 58392340 | G/A | G = 0.58 | G = 0.59 | 0.8831 | 1.02 | G |
| | | | | A = 0.42 | A = 0.41 | | | |
| 1353749 | 85894 | 58395194 | G/A | G = 0.43 | G = 0.39 | 0.1596 | 0.85 | A |
| | | | | A = 0.57 | A = 0.61 | | | |
| 10682149 | 86020 | 58395320 | —/CCT | — = 0.37 | — = 0.39 | 0.5382 | 1.08 | — |
| | | | | CCT = 0.63 | CCT = 0.61 | | | |
| 5868153 | 86947 | 58396247 | A/— | A = 0.72 | A = 0.71 | 0.7470 | 0.96 | — |
| | | | | — = 0.28 | — = 0.29 | | | |
| 1363882 | 88922 | 58398222 | C/G | C = 0.45 | C = 0.43 | 0.5228 | 0.93 | G |
| | | | | G = 0.55 | G = 0.57 | | | |
| 2409626 | 89662 | 58398962 | T/C | T = 0.84 | T = 0.85 | 0.8581 | 1.03 | T |
| | | | | C = 0.16 | C = 0.15 | | | |
| 2968018 | 92367 | 58401667 | G/A | G = 0.75 | G = 0.75 | 0.8411 | 0.97 | G |
| | | | | A = 0.25 | A = 0.25 | | | |
| 954740 | 93154 | 58402454 | A/G | A = 0.00 | A = 0.00 | | | |
| | | | | G = 1.00 | G = 1.00 | | | |
| 986067 | 94979 | 58404279 | T/C | T = 0.04 | T = 0.06 | 0.2475 | 1.43 | T |
| | | | | C = 0.96 | C = 0.94 | | | |
| 6869400 | 97598 | 58406898 | T/C | T = 0.00 | T = 0.00 | | | |
| | | | | C = 1.00 | C = 1.00 | | | |
| 5010782 | 98532 | 58407832 | T/A | T = 0.68 | T = 0.69 | 0.8644 | 1.02 | T |
| | | | | A = 0.32 | A = 0.31 | | | |

[0295] Allelotyping results were considered particularly significant with a calculated p-value of less than or equal to 0.05 for allelotype results. These values are indicated in bold. The allelotyping p-values were plotted in FIG. 4. The position of each SNP on the chromosome is presented on the x-axis. The y-axis gives the negative logarithm (base 10) of the p-value comparing the estimated allele in the case group to that of the control group. The minor allele frequency of the control group for each SNP designated by an X or other symbol on the graphs in FIG. 4 can be determined by consulting Table 23. For example, the left-most X on the left graph is at position 58309549. By proceeding down the Table from top to bottom and across the graphs from left to right the allele frequency associated with each symbol shown can be determined.

[0296] To aid the interpretation, multiple lines have been added to the graph. The broken horizontal lines are drawn at two common significance levels, 0.05 and 0.01. The vertical broken lines are drawn every 20 kb to assist in the interpretation of distances between SNPs. Two other lines are drawn to expose linear trends in the association of SNPs to the disease. The light gray line (or generally bottom-most curve) is a nonlinear smoother through the data points on the graph using a local polynomial regression method (W. S. Cleveland, E. Grosse and W. M. Shyu (1992) Local regression models. Chapter 8 of Statistical Models in S eds J. M. Chambers and T. J. Hastie, Wadsworth & Brooks/Cole.). The black line provides a local test for excess statistical significance to identify regions of association. This was created by use of a 10 kb sliding window with 1 kb step sizes. Within each window, a chi-square goodness of fit test was applied to compare the proportion of SNPs that were significant at a test wise level of 0.01, to the proportion that would be expected by chance alone (0.05 for the methods used here). Resulting p-values that were less than 10⁻⁸ were truncated at that value.

[0297] Finally, the exons and introns of the genes in the covered region are plotted below each graph at the appropriate chromosomal positions. The gene boundary is indicated by the broken horizontal line. The exon positions are shown as thick, unbroken bars. An arrow is place at the 3′ end of each gene to show the direction of transcription.

### Example 9

### GPX3 Proximal SNPs

[0298] It has been discovered that a polymorphic variation (rs869975) in a gene encoding GPX3 is associated with the occurrence of low BMD (see Examples 1 and 2). Two hundred thirty-three additional allelic variants proximal to rs869975 were identified and subsequently allelotyped in low BMD case and high BMD control sample sets as described in Examples 1 and 2. The polymorphic variants are set forth in Table 24. The chromosome position provided in column four of Table 24 is based on Genome “Build 34” of NCBI's GenBank.

TABLE 24

| | Position in | | | | | |
|---|---|---|---|---|---|---|
| | SEQ ID | | Chromosome | | | |
| dbSNP | NO: 5 | Chromosome | Position | Alleles (A1/A2) | genome_letter | deduced_iupac |
| 1478398 | 231 | 5 | 150385031 | a/g | t | Y |
| 1478397 | 330 | 5 | 150385130 | t/c | a | R |
| 1160114 | 582 | 5 | 150385382 | g/c | g | S |
| 1160113 | 589 | 5 | 150385389 | a/g | c | Y |
| 1382323 | 1060 | 5 | 150385860 | a/g | c | Y |
| 1160112 | 1066 | 5 | 150385866 | g/a | t | Y |
| 7709870 | 1311 | 5 | 150386111 | g/a | a | R |
| 7710643 | 1556 | 5 | 150386356 | g/t | g | K |
| 7730467 | 1655 | 5 | 150386455 | t/c | t | Y |
| 6579829 | 1692 | 5 | 150386492 | a/c | a | M |
| 6579830 | 1802 | 5 | 150386602 | g/a | g | R |
| 6579831 | 2061 | 5 | 150386861 | t/a | a | W |
| 6896232 | 2112 | 5 | 150386912 | t/a | t | W |
| 1351131 | 2153 | 5 | 150386953 | t/c | g | R |
| 1038074 | 2667 | 5 | 150387467 | c/t | g | R |
| 1478396 | 3115 | 5 | 150387915 | t/c | a | R |
| 6880512 | 3186 | 5 | 150387986 | g/a | a | R |
| 4958858 | 5621 | 5 | 150390421 | t/c | t | Y |
| 4958431 | 5735 | 5 | 150390535 | t/g | g | K |
| 4958432 | 5829 | 5 | 150390629 | g/c | g | S |
| 6898463 | 6658 | 5 | 150391458 | a/c | c | M |
| 4958859 | 7901 | 5 | 150392701 | g/c | c | S |
| 4130064 | 11447 | 5 | 150396247 | g/a | g | R |
| 4130065 | 11466 | 5 | 150396266 | a/g | a | R |
| 4133119 | 11984 | 5 | 150396784 | t/c | g | R |
| 4958860 | 15803 | 5 | 150400603 | t/g | t | K |
| 4958861 | 16257 | 5 | 150401057 | t/g | t | K |
| 4437356 | 17604 | 5 | 150402404 | c/a | c | M |
| 4958868 | 19762 | 5 | 150404562 | c/t | t | Y |
| 1478400 | 22367 | 5 | 150407167 | a/g | g | R |
| 6889375 | 22709 | 5 | 150407509 | a/g | g | R |
| 1600159 | 23631 | 5 | 150408431 | g/c | c | S |
| 6875892 | 23686 | 5 | 150408486 | t/a | t | W |
| 4608909 | 25599 | 5 | 150410399 | t/c | t | Y |
| 2345000 | 26973 | 5 | 150411773 | a/c | c | M |
| 4516840 | 28457 | 5 | 150413257 | g/t | t | K |
| 2054440 | 28669 | 5 | 150413469 | a/g | a | R |
| 707141 | 29908 | 5 | 150414708 | c/t | a | R |
| 707142 | 30105 | 5 | 150414905 | a/g | t | Y |
| 841236 | 30711 | 5 | 150415511 | a/g | a | R |
| 707143 | 30851 | 5 | 150415651 | g/a | t | Y |
| 707144 | 31203 | 5 | 150416003 | t/c | g | R |
| 6869405 | 31446 | 5 | 150416246 | a/c | c | M |
| 707145 | 31638 | 5 | 150416438 | c/t | g | R |
| 707146 | 33064 | 5 | 150417864 | c/t | g | R |
| 707148 | 33958 | 5 | 150418758 | c/a | t | K |
| 707150 | 35182 | 5 | 150419982 | a/t | t | W |
| 5872184 | 38332 | 5 | 150423132 | a/ac | a | N |
| 3763015 | 40875 | 5 | 150425675 | g/a | c | Y |
| 2042235 | 41624 | 5 | 150426424 | t/c | t | Y |
| 3763013 | 41671 | 5 | 150426471 | a/g | c | Y |
| 2042236 | 41825 | 5 | 150426625 | g/a | g | R |
| 1946234 | 42920 | 5 | 150427720 | c/a | a | M |
| 1946235 | 42935 | 5 | 150427735 | t/c | t | Y |
| 1946236 | 43001 | 5 | 150427801 | t/a | a | W |
| 8177402 | 43012 | 5 | 150427812 | t/c | c | Y |
| 8177403 | 43203 | 5 | 150428003 | c/t | c | Y |
| 8177404 | 43294 | 5 | 150428094 | t/c | t | Y |
| 8177405 | 43295 | 5 | 150428095 | t/c | c | Y |
| 8177406 | 43344 | 5 | 150428144 | c/t | t | Y |
| 8177407 | 43509 | 5 | 150428309 | t/c | c | Y |
| 8177408 | 43549 | 5 | 150428349 | g/c | c | S |
| 8177409 | 43560 | 5 | 150428360 | t/a | a | W |
| 6888961 | 43578 | 5 | 150428378 | a/t | t | W |
| 8177410 | 43640 | 5 | 150428440 | a/g | g | R |
| 8177411 | 43792 | 5 | 150428592 | g/c | g | S |
| 8177412 | 43797 | 5 | 150428597 | c/t | t | Y |
| 8177413 | 43964 | 5 | 150428764 | c/g | g | S |
| 870407 | 44297 | 5 | 150429097 | c/t | a | R |
| 870406 | 44311 | 5 | 150429111 | c/t | g | R |
| 6873202 | 44588 | 5 | 150429388 | a/g | a | R |
| 8177414 | 44775 | 5 | 150429575 | c/t | c | Y |
| 8177415 | 44921 | 5 | 150429721 | c/t | c | Y |
| 3805435 | 45006 | 5 | 150429806 | g/a | t | Y |
| 8177416 | 45098 | 5 | 150429898 | t/c | c | Y |
| 3792799 | 45185 | 5 | 150429985 | c/g | c | S |
| 3792798 | 45475 | 5 | 150430275 | t/c | g | R |
| 3828599 | 45506 | 5 | 150430306 | t/c | a | R |
| 8177417 | 45543 | 5 | 150430343 | g/c | g | S |
| 3792797 | 45601 | 5 | 150430401 | t/g | a | M |
| 8177418 | 45652 | 5 | 150430452 | t/c | c | Y |
| 8177419 | 45756 | 5 | 150430556 | ag/g | g | N |
| 8177420 | 45826 | 5 | 150430626 | t/c | t | Y |
| 8177421 | 45974 | 5 | 150430774 | c/g | g | S |
| 4958872 | 46044 | 5 | 150430844 | t/c | c | Y |
| 3792796 | 46200 | 5 | 150431000 | c/g | g | S |
| 8177422 | 46218 | 5 | 150431018 | a/g | a | R |
| 8177423 | 46221 | 5 | 150431021 | c/t | c | Y |
| 4958434 | 46280 | 5 | 150431080 | c/t | a | R |
| 8177424 | 46330 | 5 | 150431138 | —/gagtcctgg | gagtcctgg | N |
| 8177425 | 46583 | 5 | 150431383 | t/c | c | Y |
| 8177426 | 46650 | 5 | 150431450 | a/g | a | R |
| 8177427 | 46721 | 5 | 150431521 | a/g | a | R |
| 8177429 | 46808 | 5 | 150431608 | g/c | g | S |
| 6889737 | 47242 | 5 | 150432042 | c/a | c | M |
| 3792795 | 47512 | 5 | 150432312 | g/a | c | Y |
| 8177430 | 47600 | 5 | 150432400 | t/c | c | Y |
| 8177431 | 47706 | 5 | 150432506 | a/g | g | R |
| 4958873 | 47806 | 5 | 150432606 | a/g | a | R |
| 8177432 | 47978 | 5 | 150432778 | t/g | t | K |
| 8177433 | 48021 | 5 | 150432821 | t/c | c | Y |
| 8177434 | 48025 | 5 | 150432825 | g/a | a | R |
| 8177435 | 48093 | 5 | 150432893 | t/g | g | K |
| 3763011 | 48413 | 5 | 150433213 | t/c | g | R |
| 8177436 | 48933 | 5 | 150433733 | c/t | t | Y |
| 8177437 | 49097 | 5 | 150433897 | c/g | g | S |
| 4958874 | 49105 | 5 | 150433905 | t/c | t | Y |
| 8177439 | 49570 | 5 | 150434370 | g/a | g | R |
| 8177440 | 49591 | 5 | 150434391 | c/t | c | Y |
| 8177441 | 49704 | 5 | 150434504 | g/c | g | S |
| 8177442 | 49705 | 5 | 150434505 | a/t | a | W |
| 8177443 | 49798 | 5 | 150434598 | c/t | c | Y |
| 869975 | 50082 | 5 | 150434882 | a/g | g | R |
| 869976 | 50147 | 5 | 150434947 | g/a | a | R |
| 8177444 | 50356 | 5 | 150435156 | a/t | a | W |
| 8177445 | 50725 | 5 | 150435525 | t/c | t | Y |
| 7721469 | 50968 | 5 | 150435768 | c/a | a | M |
| 8177446 | 51029 | 5 | 150435829 | a/c | a | M |
| 7704191 | 51086 | 5 | 150435886 | t/c | t | Y |
| 8177447 | 51166 | 5 | 150435966 | t/c | t | Y |
| 11548 | 51493 | 5 | 150436293 | c/t | c | Y |
| 2230303 | 51539 | 5 | 150436339 | g/t | t | K |
| 7722386 | 51562 | 5 | 150436362 | g/a | a | R |
| 8177448 | 51645 | 5 | 150436445 | g/a | g | R |
| 8177449 | 51649 | 5 | 150436449 | t/c | c | Y |
| 2070593 | 51650 | 5 | 150436450 | t/c | g | R |
| 8177450 | 51656 | 5 | 150436456 | g/a | a | R |
| 8177451 | 51657 | 5 | 150436457 | t/c | c | Y |
| 8177452 | 52009 | 5 | 150436809 | g/a | a | R |
| 8177453 | 52143 | 5 | 150436943 | a/c | c | M |
| 8177454 | 52349 | 5 | 150437149 | g/c | g | S |
| 3763010 | 52421 | 5 | 150437221 | c/t | c | Y |
| 8177455 | 52532 | 5 | 150437332 | a/g | g | R |
| 8177456 | 52682 | 5 | 150437482 | a/g | g | R |
| 736775 | 53058 | 5 | 150437858 | t/c | t | Y |
| 2277940 | 53187 | 5 | 150437987 | t/c | t | Y |
| 8177458 | 53377 | 5 | 150438177 | g/a | g | R |
| 8177834 | 53699 | 5 | 150438499 | g/a | c | Y |
| 3924 | 53845 | 5 | 150438645 | a/g | g | R |
| 2233312 | 53920 | 5 | 150438720 | a/g | c | Y |
| 2233311 | 53929 | 5 | 150438729 | t/g | c | M |
| 2233310 | 55473 | 5 | 150440273 | t/c | g | R |
| 2233309 | 55690 | 5 | 150440490 | a/g | c | Y |
| 4958875 | 55850 | 5 | 150440650 | a/g | g | R |
| 2233308 | 56761 | 5 | 150441561 | c/t | g | R |
| 2233307 | 56840 | 5 | 150441640 | c/g | c | S |
| 2233306 | 57000 | 5 | 150441800 | c/t | g | R |
| 2233305 | 57116 | 5 | 150441916 | t/g | a | M |
| 2233304 | 58419 | 5 | 150443219 | t/g | c | M |
| 2233303 | 58420 | 5 | 150443220 | c/t | g | R |
| 2233302 | 58808 | 5 | 150443608 | g/c | c | S |
| 2287719 | 58906 | 5 | 150443706 | a/g | g | R |
| 2287720 | 59048 | 5 | 150443848 | c/t | c | Y |
| 7727034 | 59187 | 5 | 150443987 | c/g | c | S |
| 7727250 | 59361 | 5 | 150444161 | c/t | c | Y |
| 7709800 | 61218 | 5 | 150446018 | g/a | g | R |
| 3840312 | 61700 | 5 | 150446500 | ag/a | a | N |
| 2287721 | 62290 | 5 | 150447090 | g/a | g | R |
| 6875293 | 62596 | 5 | 150447396 | t/c | c | Y |
| 3805434 | 64049 | 5 | 150448849 | g/c | g | S |
| 2080982 | 66077 | 5 | 150450877 | g/t | t | K |
| 2080983 | 66079 | 5 | 150450879 | g/t | g | K |
| 2287722 | 66086 | 5 | 150450886 | t/c | c | Y |
| 2233301 | 66115 | 5 | 150450915 | t/g | c | M |
| 2233300 | 66150 | 5 | 150450950 | c/g | c | S |
| 4958876 | 66475 | 5 | 150451275 | c/a | a | M |
| 2233299 | 69177 | 5 | 150453977 | a/g | g | R |
| 2233298 | 69210 | 5 | 150454010 | a/g | c | Y |
| 2287723 | 69312 | 5 | 150454112 | t/g | t | K |
| 2161359 | 70244 | 5 | 150455044 | a/g | g | R |
| 7734456 | 70882 | 5 | 150455682 | g/c | g | S |
| 4292439 | 71905 | 5 | 150456705 | t/c | c | Y |
| 4958878 | 72294 | 5 | 150457094 | a/t | a | W |
| 6862024 | 72581 | 5 | 150457381 | a/g | g | R |
| 3834819 | 72786 | 5 | 150457589 | —/ca | ca | N |
| 2233297 | 72950 | 5 | 150457750 | g/a | t | Y |
| 2233296 | 73106 | 5 | 150457906 | g/a | c | Y |
| 2233295 | 73162 | 5 | 150457962 | t/c | g | R |
| 2233294 | 73273 | 5 | 150458073 | g/t | a | M |
| 7713028 | 74131 | 5 | 150458931 | g/a | g | R |
| 7713223 | 74406 | 5 | 150459206 | t/c | c | Y |
| 7713567 | 74665 | 5 | 150459465 | c/t | c | Y |
| 888989 | 74740 | 5 | 150459540 | t/c | c | Y |
| 2233293 | 75382 | 5 | 150460182 | a/g | c | Y |
| 3749657 | 75400 | 5 | 150460200 | g/t | c | M |
| 2233292 | 75460 | 5 | 150460260 | g/a | c | Y |
| 2112635 | 75863 | 5 | 150460663 | c/t | c | Y |
| 871269 | 76098 | 5 | 150460898 | t/c | c | Y |
| 3792794 | 78432 | 5 | 150463232 | a/g | c | Y |
| 6579837 | 78604 | 5 | 150463404 | g/t | g | K |
| 3805433 | 79190 | 5 | 150463990 | c/g | c | S |
| 5872186 | 79870 | 5 | 150464670 | —/a | a | N |
| 2233291 | 79928 | 5 | 150464728 | g/c | c | S |
| 2233290 | 80213 | 5 | 150465013 | g/c | g | S |
| 2233289 | 80227 | 5 | 150465027 | c/t | g | R |
| 4958435 | 81994 | 5 | 150466794 | t/g | g | K |
| 4958880 | 82187 | 5 | 150466987 | c/a | c | M |
| 1422673 | 82698 | 5 | 150467498 | t/c | c | Y |
| 2042234 | 82841 | 5 | 150467641 | a/g | a | R |
| 3805432 | 83214 | 5 | 150468014 | a/g | c | Y |
| 3805431 | 83249 | 5 | 150468049 | t/c | g | R |
| 2233288 | 83485 | 5 | 150468285 | t/c | g | R |
| 2233287 | 83807 | 5 | 150468607 | c/t | g | R |
| 3815720 | 83907 | 5 | 150468707 | g/a | g | R |
| 3792792 | 84216 | 5 | 150469016 | a/g | t | Y |
| 3792791 | 84656 | 5 | 150469456 | a/g | c | Y |
| 2303018 | 85448 | 5 | 150470248 | g/a | g | R |
| 3792790 | 85881 | 5 | 150470681 | g/t | a | M |
| 4958436 | 86539 | 5 | 150471339 | t/c | t | Y |
| 2233286 | 86796 | 5 | 150471596 | t/c | g | R |
| 2233285 | 87057 | 5 | 150471857 | g/a | c | Y |
| 7732451 | 87922 | 5 | 150472722 | t/c | a | R |
| 2233284 | 88098 | 5 | 150472898 | t/c | g | R |
| 1422674 | 89319 | 5 | 150474119 | g/t | t | K |
| 3792789 | 89678 | 5 | 150474478 | c/t | g | R |
| 4562032 | 90026 | 5 | 150474826 | c/a | c | M |
| 6865077 | 90033 | 5 | 150474833 | g/a | g | R |
| 1559126 | 90114 | 5 | 150474914 | c/g | c | S |
| 3792788 | 90326 | 5 | 150475126 | t/c | g | R |
| 1559127 | 90463 | 5 | 150475263 | t/c | t | Y |
| 3792786 | 90548 | 5 | 150475348 | a/g | t | Y |
| 6880110 | 90800 | 5 | 150475600 | a/g | a | R |
| 6861227 | 90838 | 5 | 150475638 | g/t | t | K |
| 3805430 | 91400 | 5 | 150476200 | c/g | c | S |
| 1862364 | 92086 | 5 | 150476886 | a/g | a | R |
| 4958881 | 93946 | 5 | 150478746 | t/c | t | Y |
| 3792785 | 95360 | 5 | 150480160 | a/g | t | Y |
| 6869605 | 96576 | 5 | 150481376 | a/c | a | M |
| 6870205 | 96721 | 5 | 150481521 | a/g | g | R |
| 4246047 | 98316 | 5 | 150483116 | t/a | t | W |
| 4958882 | 98497 | 5 | 150483297 | c/g | c | S |
| 3792784 | 99382 | 5 | 150484182 | c/t | a | R |
| 3792783 | 99442 | 5 | 150484242 | t/c | a | R |
| 5872188 | 99764 | 5 | 150484565 | —/ag | ag | N |

[0299] Assay for Verifying and Allelotyping SNPs

[0300] The methods used to verify and allelotype proximal SNPs of Table 24 are the same methods described in Examples 1 and 2 herein. The primers and probes used in these assays are provided in Table 25 and Table 26, respectively.

TABLE 25

| | | |
|---|---|---|
| DbSNP | | |
| rs# | Forward PCR primer | Reverse PCR primer |

| | | |
|---|---|---|
| 1478398 | TTCCCTCCCTTCCTTTCTTC | AAGATTACCCCACTGCACTC |
| 1478397 | CACATACTTGTCTGAGGATC | AGCACTCAGAATACTACCTG |
| 1160114 | AGCTGGATTCAGAGCCTTTG | TCTGCTATCACCTTGTTCCC |
| 1160113 | TCTGCTATCACCTTGTTCCC | AGCTGGATTCAGAGCCTTTG |
| 1382323 | AGAAGGACAGTTGCAACAGG | GTTCCTCATCCAGTCCTTAC |
| 1160112 | GTTCCTCATCCAGTCCTTAC | AGAAGGACAGTTGCAACAGG |
| 7709870 | TTATGACTCATAACTTTTTG | CTTTCTTGAAATGCTCAGGG |
| 7710643 | ATAAAGTCTGGGCTCAGATG | ATAGACCAGGGAACTGAGAC |
| 7730467 | TGTGGCATATCTTCTATTGC | AATGTGGCTGTTATGGTAGG |
| 6579829 | GGAGGCTTTTTCACATTCAC | AATGTGGCTGTTATGGTAGG |
| 6579830 | TGAGTATGGATTCTCAGGTG | ACCATAAGAGAGAAAAGCCC |
| 6579831 | GTGTGTGATGAATATGGGAG | TTTCTCTCCTGTGTGTATTC |
| 6896232 | GTCACACCTCTTTGTACATC | CACTGAAAGCTCTCTCACAC |
| 1351131 | AAGTGTGAGAGAGCTTTCAG | GTATAAGGTTTCTCTCTAGTG |
| 1038074 | TCATATCTTGTGGGTTGTCC | TTCACTGTGGACCACAAAGG |
| 1478396 | CATGGCCTCTTACAAGACTC | GGGTAATTGTACCCACCAAG |
| 6880512 | GAGGTATTGGTGATTAGGGC | TAAAAAGGAATTCTTGGTGG |
| 4958858 | GCAAGTGAGATCTTGGTAGG | CAGACTGGCAGGAGTACATT |
| 4958431 | CAGAGGTGTCACTTCAGGAA | CCATCTTGCTTCTTTCCCTG |
| 4958432 | TGCCTTAATTCATGCAACCC | TTATATCCAGGGAAAGAAGC |
| 6898463 | CAAATCTACTTTTGAGTACC | GACTCATCAAATGGAGAATG |
| 4958859 | GTGGTATAACTCCTCAGAAG | ATGATGAAGTTGTCTTCAGG |
| 4130064 | AATTCCTCACATTAACCCAG | CCACAGCAAAGACAAAAGGG |
| 4130065 | CCACAGCAAAGACAAAAGGG | TCCTCACATTAACCCAGGAG |
| 4133119 | AGTGAGGTATAATGCCAGCC | AAAATCTCCCTGTGTCTGCC |
| 4958860 | TATGCGGTGGAGAAGAAAGG | TCAACCCGGACAACAAAACC |
| 4958861 | ACTGGGATTTTCTGGTGAAG | ATGGGTGAGTCTCCCTTTAC |
| 4437356 | AGGTTTCTGGGTTTTCTCTC | ATGGTAGTGTGTTTGTTTGC |
| 4958868 | TTGTTGGCCTTGTTCATGTC | CCTGTAATCCCTGCACTTTG |
| 1478400 | TGGACTCCTGTGGGATAATG | CAAGACTTCCAAGTGCATCC |
| 6889375 | TACCTGTCCACAGAAATAGC | CCTGAGACCCTATGACTTTA |
| 1600159 | GGTTCATGTGATTTGGAAGC | TGACTCTCCTAGTTCTTCAG |
| 6875892 | GGGACTTCTCAGCTTCCAAA | AGGGTTCTCCAGAGAAACAG |
| 4608909 | CTGATAGAGGTTTATCTCAG | TCTAGCCAAACTCCTATGTG |
| | C | |
| 2345000 | TAACAAGCCCCTAACTAGTC | TCAGGTGAAACCAACTGAAG |
| 4516840 | GTGCAGTGGATCCTTTTTCC | CTAGACTCTAGGTAGGACAC |
| 2054440 | CCCTTGAATGAGATGGAGAC | TGGGAAAGGAAGGGAATGTC |
| 707141 | ACAGTGCTAAGCACTTTCCC | ACAGTAGACACACAGGATAA |
| 707142 | AGCCTGGCTTCTTCGTCTAC | ATTTCCACCCTGGGCACTTC |
| 841236 | ATGTGTGCATGAGAGGAGAG | CCAAAAAGGAGGAATGTGGG |
| 707143 | CTTTTAAAGCCAGATGGACC | CCACCCTGTTCTTACTGTAG |
| 707144 | ACTGCACCAGACGCTTTCAC | TTGGGCAAGGCGTGTTTCCT |
| 6869405 | TCTCTCATCATGGCTTGTGG | CTGGCCAAGCGATAACACTA |
| 707145 | TAAAGTCTGGGGAGGTCAGG | AGTGGCTGCTTTCGGAACAG |
| 707146 | GCAACAAGAGCGAAACTCTG | AAATGGGCAACATGGCAAAG |
| 707148 | ACCTTTCATATACAGCTGGG | CTGTGTTCCAGCATCATCTG |
| 707150 | ACTGATCTGGGCTAGGAATC | AAGGACAGCCAATTAACACG |
| 5872184 | TAAAATGTTGTTTACCAGGG | AAGGATGCCTATGTGACCAG |
| 3763015 | GCCAAATATTGTTTTCCTTG | ACATCGACCCTTTGTTGTAC |
| 2042235 | TCCTTCTCTGATCTCAGTTG | TTAGGAATGAAAAGCCACAG |
| 3763013 | AGAGACCTGAGATGCTACCC | ACAGGTGGACAACTGAGATC |
| 2042236 | AAAGGTGTTTCCAGCAGATA | AAAATGTAGAGAGATGCCCG |
| 1946234 | AACAAGTCATCTAGCCAGAG | CTGGCTTAGAAGCAGAAAAT |
| 1946235 | CCTGGCTTAGAAGCAGAAAA | GGCACTGGAGATCACTAATC |
| 1946236 | GCACTGGAGATCACTAATC | CAAACCACCTGGCTTAGAAG |
| 8177402 | TATCTGTGGCCAAACCACCT | CACAGGGAGCAAATTTATT |
| 8177403 | TTTCCTTGAGTCTTTGGGTC | GCCTGTAGAAAAAGGTTAGC |
| 8177404 | ATTAGGACTGTAGGGACAGA | GCTAACCTTTTTCTACAGGC |
| 8177405 | ATTAGGACTGTAGGGACAGA | TTTTCTACAGGCATGTCAGC |
| 8177406 | ATGTCAGCTGTGATCCTTAT | GAAAACCCCATTCTGGGTAG |
| 8177407 | TGATGGAAGTCTCCATTCTG | AATTTCCAGAGGACCATCGC |
| 8177408 | GGGCTAATAGCTCCCTAGAA | CGCCAGGTGTTTTTAAAACC |
| 8177409 | ATGCTTCCCAGAATGGAGAC | TCCATTACAGCCAGGGCAAG |
| 6888961 | TCCTCTTTTGGCTCCAAAGT | TTCCATCAGTTCTAGGGAGC |
| 8177410 | TCCTTTCGCACTTTGGAGCC | ATAAGCAAATCTGGGCAGAG |
| 8177411 | TGTGACCAATCCGCGGCCAA | TGAAATCCCAGCCGCCTAGC |
| 8177412 | TGAAATCCCAGCCGCCTAG | TTTCAAGCCCTCGGGTGTGAC |
| 8177413 | TGCAGGCGTCCTGCCTGCT | TCACTCACCTTCGACTTCTC |
| 870407 | GTGACATAGATGTAGCAAGG | AGAATGACTAAGGGAGGAAG |
| 870406 | CGGAGGTGACATAGATGTAG | AGAATGACTAAGGGAGGAAG |
| 6873202 | TAGAAATGGCCACTTGGATT | AGTGTTCTGCACTGTCACTC |
| 8177414 | GGGATGCTTGGAGAAGCTGA | AATGAGGACAGTGGGTCCTG |
| 8177415 | CCTCAGTCTATTTCCAGCAG | ATAAGCATGCTGGGTCATCC |
| 3805435 | GACAGTATGTACTGGGGTGG | TTTGAGTCTATCCCTACACC |
| 8177416 | GAAGACCCAGAGGATTTTAG | AGGGATAGACTCAAAGCGAG |
| 3792799 | GGACAGAATTTTGGAAACGG | CTAAAATCCTCTGGGTCTTC |
| 3792798 | ATTTTCCAGGTCAGGAATGG | CCAAAACTGAAGGTTGGGAC |
| 3828599 | AGTCAGTCCCAACCTTCAGT | CAGGGCCCAATTGTATCTTC |
| 8177417 | AGTTATTCATGGAGTCCACG | TTTTGGAAGGGTCAAAGAAG |
| 3792797 | GAGTCCATTTATCCTTCCCC | ACGTGGACTCCATGAATAAC |
| 8177418 | AAGTCCTGACTGGTTGTATG | CTCAGAGAGAATAGGATGGG |
| 8177419 | ATGCCCATCTCTGCTCCCAA | TCCTAACCCAGAGCTAAGAC |
| 8177420 | ATTCCATTCTCCACATGCCC | TAAGAGTTCAGATGTCTTAG |
| 8177421 | ATTGAAAGGGAGATGCTAGG | TTGTAGAGACAAGGAGCGTG |
| 4958872 | AGTCACCTAGAAACCAGCAG | ACAAAAGGACTGCAGAAGCC |
| 3792796 | CAATATGATGCTGTGAGAAG | ATCTTACAATGGAGGAGCTG |
| 8177422 | ATCTTACAATGGAGGAGCTG | TATGATGCTGTGAGAAGTGG |
| 8177423 | ATCTTACAATGGAGGAGCTG | TATGATGCTGTGAGAAGTGG |
| 4958434 | CTGCTGGTCTTGTGTCTTTC | AGACCACTTCTCACAGCATC |
| 8177424 | GGCTTGAGAGTTGGATGATG | GGAGAGGAGAAAGACACAAG |
| 8177425 | AGAGCAAAACAGGCCTGGAG | ACCCATGGGCCACCTTCTGA |
| 8177426 | ATTTCGTTCCAAGAGACTCC | ATATGTCCAGGGAGATAAGC |
| 8177427 | TTATCTCCCTGGACATATGC | GGCAAGGAGAACCCTATTTC |
| 8177429 | CAGGTTGTCCTAATAATGGG | ATGAAATAGGGTTCTCCTTG |
| 6889737 | CATGACAGAGGCAGCTCTTC | TGAAGGGAGTGATATATGCT |
| 3792795 | GGCCACAAAGGACCTTAAAG | TGACACAATTTGGCAGGTGG |
| 8177430 | AGTAGGATGTGGCCTATGAG | ATTGTGTCAATGATGCAATG |
| 8177431 | CATGATCCTATCAAGCCATC | GACCTGAGTTTCCTCATTTA |
| 4958873 | GCCAGTCCAAGACCACACAG | TGGGAGACCTGGGCTCCAT |
| 8177432 | CCCGGAACATTAACACATGC | TTACCAAATAGGGAAGCAGG |
| 8177433 | GGACAGGAAAGATGAAGCTG | ATGCAGGTACTGTTGCTTTT |
| 8177434 | GGACAGGAAAGATGAAGCTG | ATGCAGGTACTGTTGCTTTT |
| 8177435 | ATTGGGAGCCTCTGAATCAC | GGCCAGTGTGAAGGAAAAAC |
| 3763011 | GTGCTTTTTAAGCACTTAAT | CTCCTAATTCCTTGTTTAAG |
| 8177436 | CACTGTGTTCCGTGGTTTTG | CCTAGAACATGTCCAAAGGC |
| 8177437 | GAGATGGTAACTGAAGCTCC | TGCCAAGAGAAGCACCAAAG |
| 4958874 | TGCCAAGAGAAGCACCAAAG | GAGATGGTAACTGAAGCTCC |
| 8177439 | AGAGAAGCATCCCAGAAAAA | TCCATGCTCTGCCTGGCAAT |
| 8177440 | GCAATCACAGGCGAATTCCC | GCATCCCAGAAAAAGCACTC |
| 8177441 | TCCCCAGTTTCCTCAGTGTC | AACAGAGCAGAGTGCGTTTG |
| 8177442 | TCCCCAGTTTCCTCAGTGTC | AACAGAGCAGAGTGCGTTTG |
| 8177443 | TGCCAAAGATTATGGGAGGG | GAGCAAGAACTATCCATCCC |
| 869975 | CTTTCTCGGGCCTCAGTAGT | CTGTCTCATCCACACCACTC |
| 869976 | AGTGCATTCAGTTCTGGGCC | AGTGGTGTGGATGAGACAGG |
| 8177444 | AGGAGAGTAGTTCTTGGTGG | AGAAAGCTCCTCTCACATGG |
| 8177445 | TTCTCTCCATTGACATCCCC | TCAACAGGTATGTCCGACCA |
| 7721469 | ACTATTGTTCCAACTAGAGG | ATGTTCACTCTGGGTCCTTC |
| 8177446 | AGTTTGGGAGTTAGAAGACT | CAGAAGGACCCAGAGTGAAC |
| 7704191 | TTCCTGGGGAATAGCCTGGC | CGCTGGCAGTCTTCTAACTC |
| | C | |
| 8177447 | TGGGAGGACAGGAGTTCTAG | GCCTCAAGCAAGGTTGACAC |
| 11548 | TGTTCAGGAAGAAATCCGTG | GGGGCCTTGAGTGATAGGA |
| | T | |
| 2230303 | TGCCTGGCAGTACACAGAAC | ACTATCTACCCATCACAGAC |
| 7722386 | CCTGTAGGCATGTGTGTAAA | GCACAAATGGATGCATACAG |
| 8177448 | CAGATGGTACACATTCCCAG | GCCTACAGGTATGCGTGATT |
| 8177449 | CAGATGGTACACATTCCCAG | GCCTACAGGTATGCGTGATT |
| 2070593 | ACACATGCCTACAGGTATGC | CAGATGGTACACATTCCCAG |
| 8177450 | CAGGCACACAGATGGTACAC | GCCTACAGGTATGCGTGATT |
| 8177451 | CAGGCACACAGATGGTACAC | GCCTACAGGTATGCGTGATT |
| 8177452 | TGGCCCTTGCTGTCACATCT | TACATCCCCACCCCACAGTT |
| 8177453 | AGGGGTGGCATCCCTGCCCA | TGAGGGGCCAGCCCTTAGTG |
| 8177454 | TGCACCCACTGTAAAAAGT | AAGTGAGGAGGAGAAGGTGG |
| 3763010 | AGTGGGTGCAAAGGTAATTG | TGATCTCAGGGAGAATTGTG |
| 8177455 | ATGTAGCCCTATTAGGGGTG | AGCTAACTATCAGGTTGTTG |
| 8177456 | CCCGGGAGTTTGAGGCTATA | AGTGCAGTGGCTCTTCACAG |
| 736775 | TACTCTTGAGTAATGGTGAC | TGGCCTAGGCTCCTTCCACT |
| 2277940 | CGAATCATGGACATAAATCC | TCAGGGAAAGGAAGAAAAGG |
| 8177458 | ACAGTAGCCTTGCTGAAGCC | CAGCTTCAGGCTGGCGCCC |
| 8177834 | TCTTAGGATTGCTGCTCCTG | GAAAAACTCCTTCCCTGCTG |
| 3924 | TCCCCAGTCCTGTAAACAGC | GAGCCTCAGCTGGATGAGAG |
| 2233312 | ATTGTGTCATTTGGCTCCAC | CACACCGTGCAAGTGGCTTC |
| 2233311 | TTGTGTCATTTGGCTCCACC | CGTGCAAGTGGCTTCTAGTT |
| 2233310 | CACTGTTTTGGAAAGCTGGG | TTATCTGCCAGCATTGCCTG |
| 2233309 | ATTTAGTATTGTCCTGGCAC | TATTCCGGCTGCGACAAAAC |
| 4958875 | GGGATAACTTGCTGAAGGTC | GCTTAAGAGATTGGCTCTGG |
| 2233308 | AGACACCTTCCAGAGAGGA | AGAGCCAGGCCCTGGACAC |
| 2233307 | TCTTCCATCTGGTGAGTCTG | TCCTCTCTGGAAGGTGTCTG |
| 2233306 | CCACCCAGAACATCTCTGC | ATGGTGTGGCACCATGGCTG |
| 2233305 | CTAGCCTTCAGAGAGCTAAC | TCTGGCTTTGGCCTGCAACA |
| 2233304 | TGGCCCAGAGGGAAGCATCA | CCTGGATCCAGGGCCTAAC |
| 2233303 | TGGCCCAGAGGGAAGCATCA | CCTGGATCCAGGGCCTAAC |
| 2233302 | ACCAGGGCCCTCCAATCCAT | AAATGCCCAGGTAAGAGTGA |
| 2287719 | CTGCAGCTTCTCCACTTGCT | TCGTGAGCGCATGAATGAGG |
| 2287720 | AGGGAGGGTGAAGAGAGGGA | ATCTGTGACCCCAGCAGGAG |
| 7727034 | AGAGTAGTTCTGTGTCCCTC | TGGTTGATGGCTTTCAACGT |
| 7727250 | TTGGATCTGCTGGTTCTGAG | ATGTGAAACTACAGGCTAAG |
| 7709800 | TTGCTCATGACCTAGGCATC | CTTTATCTTCCTACTCCACC |
| 3840312 | GAAATGTGCTGGAAAGCAGG | CCTCTCCAGTTCAGTTTTGC |
| 2287721 | CCTTGAGTCCAGCTGCAATG | GGGTTACCCTTCCTAAGCTG |
| 6875293 | ATGGACATTACTGTACCGAC | TGGCCCAGCCCTTACGTTCT |
| 3805434 | AAATAAGGCCCCTGGTGTCC | GGGCATGGTCTTTTGCCTAG |
| 2080982 | CTGCCTCTTTAGCAGCTTTG | AACTTCTCCTCTGGGCCATA |
| 2080983 | CTGCCTCTTTAGCAGCTTTG | AACTTCTCCTCTGGGCCATA |
| 2287722 | CTGCCTCTTTAGCAGCTTTG | AACTTCTCCTCTGGGCCATA |
| 2233301 | CACAGGGCATGCCTGGTCTT | CCACTCCCCAAGGTTCAAAG |
| 2233300 | TGAACAAGCAGTGGGACCAG | AAGACCAGGCATGCCCTGTG |
| 4958876 | TTTTACCTTGCCAGGAAAGC | CAAAGAGGTGTGTGTGTTCC |
| 2233299 | CCAGCATCTTCACCTTCTTC | TTTTGGTGAAGGCTCCTCTG |
| 2233298 | TTTTGGTGAAGGCTCCTCTG | AGCATCTTCACCTTCTTCTC |
| 2287723 | AATTATCTCACCCAGTCTCG | TGGGAGGAATAGGGAGACAG |
| 2161359 | ACAGCTCTTCCTTACAAAAG | TTAGTGACCATTGGTGGATC |
| 7734456 | AATAGTCTAGAGAGTTCCCC | CCTGGGTTCTATAAGATGTTG |
| 4292439 | CCCTGGACAGGTCTCTTTAC | AGGAAGAGCATCTGGCTCGG |
| 4958878 | AGAGTTTACCCAGGACATGC | TAGAATGGAATACTAGTCCC |
| 6862024 | GTGCTGGGACTAGAGGATAG | TGTTGGCTAGTGTCTGTGTG |
| 3834819 | TGGGAACCACTCTCTAAGAC | GTGTTGAGTCGTTTGCTCAG |
| 2233297 | ATGAAGCCACAGTGACTACC | GTGGTAGAAGGTTCTAGCTG |
| 2233296 | AACCAAGGATGCTACAGAAG | ATGGAAGGGACAGGCAAGAA |
| 2233295 | TTGCCTGTCCCTTCCATCTT | ATCCCAGGGAGGAAAATTTG |
| 2233294 | TGGGATGGAGGTAAACAGAG | CAACTCATGCGATAGTGAGC |
| 7713028 | CTGGTGAAATACATCACCAC | TTGAGTAGCTGGGACTACAG |
| 7713223 | CTTTTGGATGGCCAAGGATG | CCAGCTTCAGTTTCTGAATC |
| 7713567 | AGCTGGTACCCACCAGATGA | ATCCTGTGAGTGGCCACAATT |
| 888989 | CAGGGACTTGATTGGAGTCT | ACTCACAGGATGGAGAGCAA |
| 2233293 | TCAGAGAAGGGGTGAGGAGT | AACCCAGAAATCAGTGCTGC |
| 3749657 | AGAAATCAGTGCTGCACACC | TAAGTTCAGGCCCCTCAGAGA |
| 2233292 | TGAACTTACCGCAGCCTCTC | CCAAGTTGGATAAGGGCCTG |
| 2112635 | TCCATCCCTTCTCCTTCAT | GGACTTCTCTGAGGAGATGG |
| 871269 | TTCCACAAACTTTGAGCTGG | TAATTAATTCCTGAGCTCCC |
| 3792794 | TCTGCTAGAAGGTAAGCTTG | AGTGTGTATGAAGTGCCACG |
| 6579837 | ATAGATCCTAGGCCCCTTAA | AGGAAATAAACAAGGAGGGG |
| | A | |
| 3805433 | CTTAGCCTTGTGGGCTTTAG | AAGCCTCCGTTTTGCCATCT |
| 5872186 | TCCCGTATTTCCCCATTTCC | GCTTTTTGTTCAGGGTGATG |
| 2233291 | CCTTATCCTGTTCATCACCC | AATCCACTGGTACCATGGGG |
| 2233290 | CTGCAGGTGCAGCATCAGG | TACTCAGGCCTTGGTGAAGA |
| 2233289 | TCAGGCCTTGGTGAAGAGTG | ATCAGGTTGCCGTCCTCAC |
| 4958435 | AAGTTCTGCTCATCCTTCCC | GATCTCTGAGGCTCCCTGTA |
| 4958880 | TCTGGAGGAATGGCAATGAC | ATTTCCTCTTGTTAGAATGC |
| 1422673 | ATGCTTGTGTTCACTGGTTG | CATGCTAGTTAGCCAGACAG |
| 2042234 | GCACCTATTGCTCGCATAAC | TCTACCTTCTCCATTCTCCC |
| 3805432 | AAGGCCCAGGGCCCTGTAAG | AACCTCCTTCCTGTGTGCTCC |
| | A | |
| 3805431 | AAATCACCTGTCTTACAGGG | TTTGGGTCTGTGGGCTTCCA |
| 2233288 | ATATGTGAGCGAGAAGCACC | ACAGAACCTGTTCAGATCCC |
| 2233287 | ATGACAGGCTTGTCGAGAAT | TTTTGAGTACACAGGGACCG |
| 3815720 | TGCTGGTTCAAGGTCAGCTA | TAATGTGAGGTCATATCCCC |
| 3792792 | TTCTCAGATCAGTTCACTCC | AACACAGATGGCAGCTGTTAC |
| 3792791 | GATTGCATAGTTCAGCATCC | CATTACCCGTGTAACCTCAG |
| 2303018 | CAAATGTCACAGCATCTCCC | TAAAACTTACACTGGATGGA |
| 3792790 | CATAAAAGCCCCATATCCCC | AGGGAGGGCCAAGTCTCAGT |
| 4958436 | GCCTTGGGGTCTTTATCAGC | ATATGCCAGCTCCAAGTGAC |
| 2233286 | ATGAATGGAAGGGTAGCCTG | ATCCTTCACAGTGAACTCCC |
| 2233285 | TTCCAAAAGCTCCCCTAGAG | ACGGGGAGAAGCAGCACAC |
| 7732451 | CATCTCTCGTGCCCCAGAAA | GCTGGAAGGCCCAGTTAATG |
| 2233284 | TACATGGTGCATAGAGACAG | ATATGCCTCTGCCCAAGTCA |
| 1422674 | TGCTGATAATTCCTCAGCAC | GTCCATTCACTCATCCATTC |
| 3792789 | GAGGATTCCTGATGAAACAG | TTCACTGGGGACCTCAGAAG |
| 4562032 | ATTTTACAAGGGAGAAACTG | CTGACTTTGCATCTTGGCTC |
| 6865077 | CTGACTTTGCATCTTGGCTC | ATTTTACAAGGGAGAAACTG |
| 1559126 | CACCATACTCACACAGCCAG | ATGGTGCTGCCCTACAAAGA |
| 3792788 | CCCTTCTCCCAAAGACTGAC | AGTGTGGGTAGCTGTCCTTT |
| 1559127 | ACTGTTTCTTAGTTCGGTGG | GGTGACTTGTTTTTAACCTG |
| 3792786 | TGAGGACAGAGGCAAGCAGA | AACAGTGTGGGGGCTGCACTT |
| 6880110 | TCAAGAACAGTGAAACAGAG | TGGTGGACAAGAACCAGGAC |
| 6861227 | CATGCCTTCATGTGGTGTTG | AGCAGTGTCCTGGTTCTTGT |
| 3805430 | TCCAGAGAGGGTTTTCCCAC | GGGAGAAAGAAAGGCAGTGG |
| 1862364 | AATCCCATGGCACACCACAG | TGTAGTTTGTGGAACCAGGC |
| 4958881 | GGACTGGAGGTCATCATAAC | TTCCACCCAAGGATGAAAGG |
| 3792785 | TTTGTTCTACCACTAACCAG | CTACATGGATGAGGAAGCAG |
| 6869605 | TTTGTCCAGCTTCTGTGTAC | AGGTGTGAGTTACCTAAGGG |
| 6870205 | GAATCATCAAGAAGGGACTG | ACCCCATTCTTTTTGATGGC |
| 4246047 | AAGCTGGTCTCAAACTCCTG | TGTTATTTAGGCTGAGCGTG |
| 4958882 | TTGTTGGTGGCTGATGAAGG | GCTCACTCATCTGGTTTAAG |
| 3792784 | ATGATTTTCCCATGACTGGC | AAACAGCCAGCTGCTGCTCA |
| 3792783 | AATCTGAAGAGTGACTGTCC | AAAGACCTTGGCGGCCACCAT |
| 5872188 | CCTTTGCCGACTTTGGTTTC | AGACTTGGAAGAGAATGCCC |

[0301] TABLE 26

| | | |
|---|---|---|
| dbSNP | Extend | Term |
| rs# | Primer | Mix |

| | | |
|---|---|---|
| 1478398 | TGAGACAGGGCCTCACTCT | ACT |
| 1478397 | GTCTGAGGATCAGTAATAATAC | ACT |
| 1160114 | CTTAATTGCAATGCCTCTT | ACT |
| 1160113 | CTTGTTCCCTACCTAGC | ACT |
| 1382323 | CTGACCAGGGTAACAAC | ACT |
| 1160112 | TCTCCAATCACCGTTGT | ACG |
| 7709870 | CCTACAAGAAATATCAAGGC | ACG |
| 7710643 | GAGCATTACAGTTGTCAC | CGT |
| 7730467 | TTGCCACTAAATAAATCCAA | ACT |
| 6579829 | CATTCACTATGCTCTTTTTTT | ACT |
| 6579830 | ATTCCCTGCTGAAGGTT | ACG |
| 6579831 | AATATGGGAGAGCCTTC | CGT |
| 6896232 | AATACACACAGGAGAGAAA | CGT |
| 1351131 | GAGAGCTTTCAGTGAAGT | ACT |
| 1038074 | GTGGGTTGTCCACATAT | ACG |
| 1478396 | CAAGACTCACTGCAATTTA | ACT |
| 6880512 | GGGCTTCAACATATGAAT | ACG |
| 4958858 | GAAGATGAAGGCCTGAG | ACT |
| 4958431 | CTTCAGGAAAATCCGGC | ACT |
| 4958432 | AAATACAGTCAGCCCCC | ACT |
| 6898463 | CTTCATTTCAGGTATTCTACT | ACT |
| 4958859 | TCAGAAGAGGAGAGCAC | ACT |
| 4130064 | CCTTCCAAAATTTCCCT | ACG |
| 4130065 | GGGAAATTTTGGAAGGT | ACT |
| 4133119 | GCCAAGTATCCTGTATCAA | ACT |
| 4958860 | AGGGCAACAATAAGGGA | ACT |
| 4958861 | AAGGAGCAGAAGCATGA | ACT |
| 4437356 | CTGAGCAGCCCTAGTGA | CGT |
| 4958868 | CTCCTGACCTCGTGATC | ACG |
| 1478400 | TGGGTGAAAAAATTGGTA | ACT |
| 6889375 | CTGCTGATGATGTAGGAAT | ACT |
| 1600159 | GAAGCTGAGAAGTCCCG | ACT |
| 6875892 | CCAATTCATTATAGGAAATTTTTT | CGT |
| 4608909 | GGTTTATCTCAGCATTGTTTAT | ACT |
| 2345000 | CTAGTCTCCTTGTTCTCTTA | ACT |
| 4516840 | TCCTTTTTCCACCTTGC | CGT |
| 2054440 | GTAAACATCCAAAAGCATTTC | ACT |
| 707141 | ACATCCTGAGATGAAGG | ACG |
| 707142 | CAGGCAGCAGCAGCACA | ACT |
| 841236 | ACCTTCTCTGAGGGTATTCTA | ACT |
| 707143 | CCCTTAGAGGTCATCTGGTC | ACG |
| 707144 | CCATACAAAATCCCCTTG | ACT |
| 6869405 | TGACTGGGACCCAGGCT | ACT |
| 707145 | GGCCCAGCAGCCAGAAG | ACG |
| 707146 | GAAAAGAAAGGCTAAGTGA | ACG |
| 707148 | ACTGAGGCCCAGAGAGG | CGT |
| 707150 | GTCTGCGCCACCTTCCC | CGT |
| 5872184 | GGAGACTCAATGCCAGG | ACT |
| 3763015 | CTGTGCTGGTGCTGGTG | ACG |
| 2042235 | ATCTCAGTTGTCCACCT | ACT |
| 3763013 | TACCCCTGGATTGCTAC | ACT |
| 2042236 | AGGCACCTAGGGTCACA | ACG |
| 1946234 | CACTGGAGATCACTAATC | CGT |
| 1946235 | CCTCAGTTTCCTCAGCT | ACT |
| 1946236 | ACACAGGGAGCAAATTT | CGT |
| 8177402 | CCAAACCACCTGGCTTA | ACT |
| 8177403 | GTCTTTGGGTCTTCATTT | ACG |
| 8177404 | TCCTCCCCATCATAAGG | ACT |
| 8177405 | TTCCTCCCCATCATAAG | ACT |
| 8177406 | CTCTGTCCCTACAGTCC | ACG |
| 8177407 | GCATTTCTTATTCCTATCGAG | ACT |
| 8177408 | GCTCCCTAGAACTGATG | ACT |
| 8177409 | GAGACTTCCATCAGTTCT | CGT |
| 6888961 | CCATTACAGCCAGGGCA | CGT |
| 8177410 | CTTTGGAGCCAAAAGAG | ACT |
| 8177411 | GCGGCCAAGCCGAGACC | ACT |
| 8177412 | GATTGGCTGCAAGGGTC | ACG |
| 8177413 | TCCTGCCTGCTTTCCCT | ACT |
| 870407 | GACCCTCGAGGTGGCAG | ACG |
| 870406 | AGATGTAGCAAGGCGAC | ACG |
| 6873202 | CAGAGATCTGTGCTAGAA | ACT |
| 8177414 | TGTTCTCTGAAATTTCCTC | ACG |
| 8177415 | AGCAGGTGTGTGGCCCA | ACG |
| 3805435 | TACTGGGGTGGGCTCTG | ACG |
| 8177416 | TGCATGTTGGGAAGTTG | ACT |
| 3792799 | CGGAATCCTAGACTCATAA | ACT |
| 3792798 | ATAGACAGGCCAGCACC | ACT |
| 3828599 | CAACCTTCAGTTTTGGAA | ACT |
| 8177417 | ACGTTCTCCCCACTAGC | ACT |
| 3792797 | ATCCTTCCCCAGAGTGC | ACT |
| 8177418 | CTCACCCTAAAACTTTTCTA | ACT |
| 8177419 | CTGCTCCCAAGTTCTTA | ACT |
| 8177420 | ACATGCCCCATAACCCT | ACT |
| 8177421 | TCCCCAGTCCAACTTCA | ACT |
| 4858872 | GCAGTTACTAGGATCCC | ACT |
| 3792796 | TTGCTGTGTCTCTGATG | ACT |
| 8177422 | CATCAGAGACACAGCAA | ACT |
| 8177423 | CAGAGACACAGCAAAGC | ACG |
| 4958434 | TCTCCTCTCCCGTCTTAT | ACG |
| 8177424 | TGGATGATGGGACTCAG | ACG |
| 8177425 | GAACGAAATCTCATGTCAA | ACT |
| 8177426 | AGCAGATTCCCACAACC | ACT |
| 8177427 | GACTTGCTCAGGGCCAC | ACT |
| 8177429 | CCTAATAATGGGAACTTGTAAA | ACT |
| 6889737 | GGCAGCTCTTCTGCACT | CGT |
| 3792795 | TTCAAGGTTTCTCCTTTC | ACG |
| 8177430 | ATGAGCCTACTCTGCCC | ACT |
| 8177431 | CATGGTTGACCTGGTTG | ACT |
| 4958873 | ACAGGGAGTTAATGGCA | ACT |
| 8177432 | TGTTGCTTTTCCCTACC | ACT |
| 8177433 | GCTGTTGTTACCAAATAGG | ACT |
| 8177434 | GAAGCTGTTGTTACCAAA | ACG |
| 8177435 | GAATCACCATGTCCATAC | ACT |
| 3763011 | AAGCACTTAATATTAAGTACCC | ACT |
| 8177436 | TGTGAAGATGATTATATAAGCC | ACG |
| 8177437 | AAGCTCCATCTTGCTGA | ACT |
| 4958874 | TGGGGCTGAGGGAAAAT | ACT |
| 8177439 | TTTCACTTCCGGGAATT | ACG |
| 8177440 | TCCCGGAAGTGAAAGGA | ACG |
| 8177441 | TCAGTGTCCCCTGGTCT | ACT |
| 8177442 | CTCAGTGTCCCCTGGTC | CGT |
| 8177443 | GAGGGTTGTAACCTCAC | ACG |
| 869975 | GGGCCTCAGTAGTTCCAGC | ACT |
| 869976 | CCAAAGAGAAAGAGCAGA | ACG |
| 8177444 | GATAAATGTCCACCATGA | CGT |
| 8177445 | CTGGAAATTAGGGACAA | ACT |
| 7721469 | ACCCTGACTAGGGTCTC | CGT |
| 8177446 | GCTGTGGCTCTAGAAGA | ACT |
| 7704191 | ATAGCCTGGCCCTGAGA | ACT |
| 8177447 | AGTTCTAGAGCAGGGAT | ACT |
| 11548 | CACACTATCTACCCATCA | ACG |
| 2230303 | GTACACAGAACTGTATGC | CGT |
| 7722386 | ACCCACACCCACATGCC | ACG |
| 8177448 | CATAGGTAGACACGTGG | ACG |
| 8177449 | AAGACACATAGGTAGACAC | ACT |
| 2070593 | GCATGGGTGTACAGCCAC | ACT |
| 8177450 | CCAGAAAGACACATAGG | ACG |
| 8177451 | CCCAGAAAGACACATAG | ACT |
| 8177452 | TGTCACATCTGCCTTGG | ACG |
| 8177453 | CCTGCCCAGGGGCCTTA | ACT |
| 8177454 | TCTTTTCTCATCCTCCC | ACT |
| 3763010 | AAAGGTAATTGCGGTTTT | ACG |
| 8177455 | GGTGGCATCTTCATGAG | ACT |
| 8177456 | TGAGGCTATAGTGTGCC | ACT |
| 736775 | TCCCTGAGGGTAGGGCA | ACT |
| 2277940 | CATGTTCATTTATGCGCT | ACT |
| 8177458 | GCCATGCCAGCCACGTC | ACG |
| 8177834 | CCTGGAGGCTTCTGCAA | ACG |
| 3924 | CTCAGTTCAGGGACTGGT | ACT |
| 2233312 | TGATCTCAGATTGCCAA | ACT |
| 2233311 | CAGAGCCAGCTGATCTCA | ACT |
| 2233310 | CCAAGAGCAGAAACTAAC | ACT |
| 2233309 | TGCTATTGTAATTTTTGGGT | ACT |
| 4958875 | CTGAAGGTCATCTAGCAA | ACT |
| 2233308 | CTTCTGAACTAAACAGCAC | ACG |
| 2233307 | GCTCCAGGGCACACACA | ACT |
| 2233306 | CTACCCCTACGCCTACC | ACG |
| 2233305 | GATGAGATGGGTGTCCT | ACT |
| 2233304 | TCAGCCGGTCAGTCCTC | ACT |
| 2233303 | ATCAGCCGGTCAGTCCT | ACG |
| 2233302 | TCCATGCCCCCTCTCCC | ACT |
| 2287719 | CTCCACTTGCTTCTTCA | ACT |
| 2287720 | TTCTCCTCAGGCCCAGA | ACG |
| 7727034 | ACATTCTGGGCTTCAAG | ACT |
| 7727250 | AGAGACCCTACAAACTC | ACG |
| 7709800 | CCTAGGCATCTCCCTGT | ACG |
| 3840312 | CTAGAGCCGTTCCCACC | CGT |
| 2287721 | CCCATCACTGGCACCCC | ACG |
| 8875293 | GAGCATTGTGAAGTGATG | ACT |
| 3805434 | TGCTGACGGGAGGAACT | ACT |
| 2080982 | AACCTTGGGGAGTGGCC | CGT |
| 2080983 | TGAACCTTGGGGAGTGG | CGT |
| 2287722 | GCAGCTTTGAACCTTGG | ACT |
| 2233301 | TGCCTGGTCTTCATCTC | ACT |
| 2233300 | GGTAATGTGGGGTTCCT | ACT |
| 4958876 | CTAAGACATGGAAACTACAT | CGT |
| 2233299 | TCACCTTCTTCTCGGCTGC | ACT |
| 2233298 | CCCCAGGCTAGTGTGAC | ACT |
| 2287723 | AAGACCCCTCACCCAAG | ACT |
| 2181359 | CATTCCATTACTACAGTAATAACT | ACT |
| 7734456 | CCCTTCCTTTACTTCCC | ACT |
| 4292439 | CCCTTTAATCTCCACTC | ACT |
| 4958878 | CAGGACATGCAAATCTATT | CGT |
| 6862024 | CTAGAGGATAGGGGAGT | ACT |
| 3834819 | CTTGACAAACTGGAATGT | ACT |
| 2233297 | ATGGAGGTCAGGCCAAG | ACG |
| 2233296 | ACATACCTGCTGCTGTC | ACG |
| 2233295 | AGCCTGGCCGCCCAGAC | ACT |
| 2233294 | CCCTGAGTTAAGAAACCT | CGT |
| 7713028 | TACATCACCACCCCTCC | ACG |
| 7713223 | GGGGTTTTTATAGCCCTA | ACT |
| 7713567 | ACCAGATGACTCATCAC | ACG |
| 888989 | GATTGGAGTCTTACAACA | ACT |
| 2233293 | GGGGCTGCAGGAGGAGG | ACT |
| 3749657 | CCTCCTCCTGCAGCCCC | CGT |
| 2233292 | TCTCGGCAGCCTGATCC | ACG |
| 2112635 | CCCCAGCTGACTTCTAC | ACG |
| 871269 | CTGGCAGTGAACAAGAG | ACT |
| 3792794 | TGTTGTATTCACTGTTGC | ACT |
| 6579837 | AGGGGTCCTGCCAACCT | CGT |
| 3805433 | TGGGCTTTAGCAGCGGG | ACT |
| 5872186 | CCTCATCCCTCCCCACA | CGT |
| 2233291 | GTCTGCCCACAACACAG | ACT |
| 2233290 | GTTGCCGTCCTCACGGG | ACT |
| 2233289 | CCCTTTCCCTCTCCAGG | ACG |
| 4958435 | ATGGGAATCACAGGACA | ACT |
| 4958880 | GAATGGCAATGACTATAACC | CGT |
| 1422673 | TGTCAGTGCCCAGTGCA | ACT |
| 2042234 | CTCGCATAACAACAATTAAAG | ACT |
| 3805432 | CCTGTAAGACAGGTGATTT | ACT |
| 3805431 | GGGCCCTGGGCCTTCCT | ACT |
| 2233288 | CCCCAAGTGACTCCAGG | ACT |
| 2233287 | AATCCTGCTTTGTGATCT | ACG |
| 3815720 | AAGGTCAGCTAGTCCCA | ACG |
| 3792792 | GGGAAGGCCAGCACAGG | ACT |
| 3792791 | AGGTGCAGGGAAAGAAG | ACT |
| 2303018 | CAGCATCTCCCACAGCC | ACG |
| 3792790 | GCTTGGGAAGGTCATCA | CGT |
| 4958436 | TGTGTGCCAGGCATCGC | ACT |
| 2233286 | GATAAACGAGAGAATGTGG | ACT |
| 2233285 | GGAAGCAAAAGCATTTACT | ACG |
| 7732451 | GTGCCCCAGAAAGAGGAG | ACT |
| 2233284 | GTGAGGCAGGAGCCAGC | ACT |
| 1422674 | CACCCAGACTGGTGCCT | CGT |
| 3792789 | CCTTGGGAGGAAGGTGC | ACG |
| 4562032 | TAACTCAGCCACGATGA | CGT |
| 6865077 | GCATCTTGGCTCTTATTG | ACG |
| 1559126 | ACAGCCAGGACACAGAG | ACT |
| 3792788 | CAGATACAAGATGAATACACC | ACT |
| 1559127 | TCGGTGGAAACATCTGC | ACT |
| 3792786 | GACCCCCAATGTCTGCC | ACT |
| 6880110 | GCCACCTTGCATGACAA | ACT |
| 6861227 | GAGTTCCATTTAGGGTG | CGT |
| 3805430 | CAATAGGATATTTCTCCTGC | ACT |
| 1862364 | CCCCACCACATCTTCTC | ACT |
| 4958881 | GCAATGTGATATCATGGC | ACT |
| 3792785 | TCTCAGGCAAATGACTT | ACT |
| 6869605 | CTCTAGATTCCTAGATAGGG | ACT |
| 6870205 | ACAAACCACCATTCATTC | ACT |
| 4246047 | TGCTCTGCCTCCCAAAG | CGT |
| 4958882 | TGATGAAGGAGAAATTTCAA | ACT |
| 3792784 | TCACTCTTCAGATTGGAA | ACG |
| 3792783 | AAATCATCAAGAACTTCCC | ACT |
| 5872188 | GAATGAAAATGTTTCACTCT | ACT |

[0302] Genetic Analysis

[0303] Allelotyping results are shown for female cases and controls in Table 27. The allele frequency for A2 allele is noted in the fifth and sixth columns for control pools and case pools, respectively, where “AF” is allele frequency. Some SNPs do not have an allele frequency disclosed because of failed assays.

TABLE 27

| | Position in | | | | | | | Low BMD |
|---|---|---|---|---|---|---|---|---|
| dbSNP | SEQ ID | Chromo-some | A1/A2 | Control AF | Case AF | | | Associated |
| rs# | NO: 5 | Position | Allele | (High BMD) | (Low BMD) | p-Value | OR | Allele |
| 1478398 | 231 | 150385031 | A/G | A = 0.28 | A = 0.34 | 0.0334 | 1.31 | A |
| | | | | G = 0.72 | G = 0.66 | | | |
| 1478397 | 330 | 150385130 | T/C | T = 0.61 | T = 0.67 | 0.0621 | 1.29 | T |
| | | | | C = 0.39 | C = 0.33 | | | |
| 1160114 | 582 | 150385382 | G/C | G = 0.96 | G = 0.92 | 0.0034 | 0.44 | C |
| | | | | C = 0.04 | C = 0.08 | | | |
| 1160113 | 589 | 150385389 | A/G | A = 0.96 | A = 0.93 | 0.0169 | 0.51 | G |
| | | | | G = 0.04 | G = 0.07 | | | |
| 1382323 | 1060 | 150385860 | A/G | A = 0.67 | A = 0.63 | 0.1288 | 0.83 | G |
| | | | | G = 0.33 | G = 0.37 | | | |
| 1160112 | 1066 | 150385866 | G/A | G = 0.91 | G = 0.85 | 0.0025 | 0.57 | A |
| | | | | A = 0.09 | A = 0.15 | | | |
| 7709870 | 1311 | 150386111 | G/A | G = 0.11 | G = 0.12 | 0.5796 | 1.11 | G |
| | | | | A = 0.89 | A = 0.88 | | | |
| 7710643 | 1556 | 150386356 | G/T | G = 0.87 | G = 0.86 | 0.7100 | 0.93 | T |
| | | | | T = 0.13 | T = 0.14 | | | |
| 7730467 | 1655 | 150386455 | T/C | T = 1.00 | T = 1.00 | | | |
| | | | | C = 0.00 | C = 0.00 | | | |
| 6579829 | 1692 | 150386492 | A/C | A = 0.92 | A = 0.89 | 0.1423 | 0.74 | C |
| | | | | C = 0.08 | C = 0.11 | | | |
| 6579830 | 1802 | 150386602 | G/A | G = 0.91 | G = 0.89 | 0.4377 | 0.86 | A |
| | | | | A = 0.09 | A = 0.11 | | | |
| 6579831 | 2061 | 150386861 | T/A | T = 0.31 | T = 0.32 | 0.7948 | 1.04 | T |
| | | | | A = 0.69 | A = 0.68 | | | |
| 6896232 | 2112 | 150386912 | T/A | T = 0.90 | T = 0.89 | 0.7880 | 0.94 | A |
| | | | | A = 0.10 | A = 0.11 | | | |
| 1351131 | 2153 | 150386953 | T/C | T = 0.51 | T = 0.49 | 0.4152 | 0.91 | C |
| | | | | C = 0.49 | C = 0.51 | | | |
| 1038074 | 2667 | 150387467 | C/T | C = 0.23 | C = 0.27 | 0.1062 | 1.25 | C |
| | | | | T = 0.77 | T = 0.73 | | | |
| 1478396 | 3115 | 150387915 | T/C | T = 0.92 | T = 0.90 | 0.1123 | 0.71 | C |
| | | | | C = 0.08 | C = 0.10 | | | |
| 6880512 | 3186 | 150387986 | G/A | G = 0.64 | G = 0.60 | 0.2313 | 0.86 | A |
| | | | | A = 0.36 | A = 0.40 | | | |
| 4958858 | 5621 | 150390421 | T/C | T = 0.06 | T = 0.13 | ˜0.00001 | 2.54 | T |
| | | | | C = 0.94 | A = 0.87 | | | |
| 4958431 | 5735 | 150390535 | T/G | T = 0.98 | T = 0.95 | 0.0132 | 0.44 | G |
| | | | | G = 0.02 | G = 0.05 | | | |
| 4958432 | 5829 | 150390629 | G/C | G = 0.86 | G = 0.85 | 0.4357 | 0.87 | C |
| | | | | C = 0.14 | C = 0.15 | | | |
| 6898463 | 6658 | 150391458 | A/C | A = 0.86 | A = 0.82 | 0.0341 | 0.71 | C |
| | | | | C = 0.14 | C = 0.18 | | | |
| 4958859 | 7901 | 150392701 | G/C | G = 0.95 | G = 0.90 | 0.0030 | 0.48 | C |
| | | | | C = 0.05 | C = 0.10 | | | |
| 4130064 | 11447 | 150396247 | G/A | G = 0.26 | G = 0.30 | 0.1514 | 1.21 | G |
| | | | | A = 0.74 | A = 0.70 | | | |
| 4130065 | 11466 | 150396266 | A/G | A = 0.16 | A = | | | |
| | | | | G = 0.84 | G = | | | |
| 4133119 | 11984 | 150396784 | T/C | T = 0.95 | T = 0.94 | 0.2216 | 0.72 | C |
| | | | | C = 0.05 | C = 0.06 | | | |
| 4958860 | 15803 | 150400603 | T/G | T = 0.10 | T = 0.17 | 0.0163 | 1.88 | T |
| | | | | G = 0.90 | G = 0.83 | | | |
| 4958861 | 16257 | 150401057 | T/G | T = 0.13 | T = 0.17 | 0.0581 | 1.38 | T |
| | | | | G = 0.87 | G = 0.83 | | | |
| 4437356 | 17604 | 150402404 | C/A | C = 0.10 | C = | | | |
| | | | | A = 0.90 | A = | | | |
| 4958868 | 19762 | 150404562 | C/T | C = 0.55 | C = 0.53 | 0.6623 | 0.94 | T |
| | | | | T = 0.45 | T = 0.47 | | | |
| 1478400 | 22367 | 150407167 | A/G | A = 0.96 | A =0.94 | 0.0584 | 0.57 | G |
| | | | | G = 0.04 | G = 0.06 | | | |
| 6889375 | 22709 | 150407509 | A/G | A = 0.59 | A = 0.61 | 0.5378 | 1.09 | A |
| | | | | G = 0.41 | G = 0.39 | | | |
| 1600159 | 23631 | 150408431 | G/C | G = 0.62 | G = 0.61 | 0.7340 | 0.96 | C |
| | | | | C = 0.38 | C = 0.39 | | | |
| 6875892 | 23686 | 150408486 | T/A | T = 1.00 | T = 1.00 | | | |
| | | | | A = 0.00 | A = 0.00 | | | |
| 4608909 | 25599 | 150410399 | T/C | T = 0.98 | T = 0.92 | 0.0008 | 0.27 | C |
| | | | | C = 0.02 | C = 0.08 | | | |
| 2345000 | 26973 | 150411773 | A/C | A = 0.57 | A = 0.55 | 0.5708 | 0.93 | C |
| | | | | C = 0.43 | C = 0.45 | | | |
| 4516840 | 28457 | 150413257 | G/T | G = 0.00 | G = 0.00 | | | |
| | | | | T = 1.00 | T = 1.00 | | | |
| 2054440 | 28669 | 150413469 | A/G | A = 0.62 | A = 0.66 | 0.1835 | 1.18 | A |
| | | | | G = 0.38 | G = 0.34 | | | |
| 707141 | 29908 | 150414708 | C/T | C = 0.45 | C = 0.46 | 0.6490 | 1.06 | C |
| | | | | T = 0.55 | T = 0.54 | | | |
| 707142 | 30105 | 150414905 | A/G | A = 0.54 | A = 0.53 | 0.7349 | 0.96 | G |
| | | | | G = 0.46 | G = 0.47 | | | |
| 841236 | 30711 | 150415511 | A/G | A = 0.55 | A = 0.54 | 0.7731 | 0.97 | G |
| | | | | G = 0.45 | G = 0.46 | | | |
| 707143 | 30851 | 150415651 | G/A | G = 0.64 | G = 0.66 | 0.6049 | 1.07 | G |
| | | | | A = 0.36 | A = 0.34 | | | |
| 707144 | 31203 | 150416003 | T/C | T = 0.69 | T = 0.75 | 0.0163 | 1.38 | T |
| | | | | C = 0.31 | C = 0.25 | | | |
| 6869405 | 31446 | 150416246 | A/C | A = 0.08 | A = 0.09 | 0.5734 | 1.13 | A |
| | | | | C = 0.92 | C = 0.91 | | | |
| 707145 | 31638 | 150416438 | C/T | C = 0.62 | C = 0.61 | 0.8223 | 0.97 | T |
| | | | | T = 0.38 | T = 0.39 | | | |
| 707146 | 33064 | 150417864 | C/T | C = 0.53 | C = 0.48 | 0.1214 | 0.83 | T |
| | | | | T = 0.47 | T = 0.52 | | | |
| 707148 | 33958 | 150418758 | C/A | C = 0.46 | C = 0.48 | 0.6249 | 1.06 | C |
| | | | | A = 0.54 | A = 0.52 | | | |
| 707150 | 35182 | 150419982 | A/T | A = 0.67 | A = 0.67 | 0.9445 | 0.99 | A |
| | | | | T = 0.33 | T = 0.33 | | | |
| 5872184 | 38332 | 150423132 | —/C | — = 0.00 | — = 0.00 | | | |
| | | | | C = 1.00 | C = 1.00 | | | |
| 3763015 | 40875 | 150425675 | G/A | G = 0.61 | G = 0.60 | 0.7976 | 0.97 | A |
| | | | | A = 0.39 | A = 0.40 | | | |
| 2042235 | 41624 | 150426424 | T/C | T = 0.13 | T = 0.20 | 0.0014 | 1.70 | T |
| | | | | C = 0.87 | C = 0.80 | | | |
| 3763013 | 41671 | 150426471 | A/G | A = 0.97 | A = 0.82 | ˜0.00001 | 0.14 | G |
| | | | | G = 0.03 | G = 0.18 | | | |
| 2042236 | 41825 | 150426625 | G/A | G = 0.90 | G = 0.86 | 0.0420 | 0.69 | A |
| | | | | A = 0.10 | A = 0.14 | | | |
| 1946234 | 42920 | 150427720 | C/A | C = 0.00 | C = 0.00 | | | |
| | | | | A = 1.00 | A = 1.00 | | | |
| 1946235 | 42935 | 150427735 | T/C | T = | T = 0.87 | | | |
| | | | | C = | C = 0.13 | | | |
| 1946236 | 43001 | 150427801 | T/A | T = 0.19 | T = 0.20 | 0.5482 | 1.10 | T |
| | | | | A = 0.81 | A = 0.80 | | | |
| 8177402 | 43012 | 150427812 | T/C | T = 0.00 | T = 0.00 | | | |
| | | | | C = 1.00 | C = 1.00 | | | |
| 8177403 | 43203 | 150428003 | C/T | C = 1.00 | C = 1.00 | | | |
| | | | | T = 0.00 | T = 0.00 | | | |
| 8177404 | 43294 | 150428094 | T/C | T = 0.97 | T = 0.94 | 0.0363 | 0.52 | C |
| | | | | C = 0.03 | C = 0.06 | | | |
| 8177405 | 43295 | 150428095 | T/C | T = 0.00 | T = 0.00 | | | |
| | | | | C = 1.00 | C = 1.00 | | | |
| 8177406 | 43344 | 150428144 | C/T | C = 0.09 | C = 0.11 | 0.1222 | 1.36 | C |
| | | | | T = 0.91 | T = 0.89 | | | |
| 8177407 | 43509 | 150428309 | T/C | T = 0.00 | T = 0.00 | | | |
| | | | | C = 1.00 | C = 1.00 | | | |
| 8177408 | 43549 | 150428349 | G/C | G = 0.00 | G = 0.00 | | | |
| | | | | C = 1.00 | C = 1.00 | | | |
| 8177409 | 43560 | 150428360 | T/A | T = 0.23 | T = 0.28 | 0.0779 | 1.29 | T |
| | | | | A = 0.77 | A = 0.72 | | | |
| 6888961 | 43578 | 150428378 | A/T | A = 0.08 | A = 0.07 | 0.3176 | 0.79 | T |
| | | | | T = 0.92 | T = 0.93 | | | |
| 8177410 | 43640 | 150428440 | A/G | A = | A = 0.00 | | | |
| | | | | G = | G = 1.00 | | | |
| 8177411 | 43792 | 150428592 | G/C | G = 1.00 | G = 1.00 | | | |
| | | | | C = 0.00 | C = 0.00 | | | |
| 8177412 | 43797 | 150428597 | C/T | C = 0.15 | C = 0.18 | 0.0943 | 1.31 | C |
| | | | | T = 0.85 | T = 0.82 | | | |
| 8177413 | 43964 | 150428764 | C/G | C = | C = 0.01 | | | |
| | | | | G = | G = 0.99 | | | |
| 870407 | 44297 | 150429097 | C/T | C = 0.07 | C = 0.11 | 0.0641 | 1.49 | C |
| | | | | T = 0.93 | T = 0.89 | | | |
| 870406 | 44311 | 150429111 | C/T | C = 0.89 | C = 0.88 | 0.5675 | 0.87 | T |
| | | | | T = 0.11 | T = 0.12 | | | |
| 6873202 | 44588 | 150429388 | A/G | A = 1.00 | A = 1.00 | | | |
| | | | | G = 0.00 | G = 0.00 | | | |
| 8177414 | 44775 | 150429575 | C/T | C = 1.00 | C = 1.00 | | | |
| | | | | T = 0.00 | T = 0.00 | | | |
| 8177415 | 44921 | 150429721 | C/T | C = 1.00 | C = 1.00 | | | |
| | | | | T = 0.00 | T = 0.00 | | | |
| 3805435 | 45006 | 150429806 | G/A | G = 0.10 | G = 0.07 | 0.1318 | 0.71 | A |
| | | | | A = 0.90 | A = 0.93 | | | |
| 8177416 | 45098 | 150429898 | T/C | T = 0.00 | T = 0.00 | | | |
| | | | | C = 1.00 | C = 1.00 | | | |
| 3792799 | 45185 | 150429985 | C/G | C = 0.00 | C = 0.00 | | | |
| | | | | G = 1.00 | G = 1.00 | | | |
| 3792798 | 45475 | 150430275 | T/C | T = 0.05 | T = 0.10 | 0.0906 | 2.06 | T |
| | | | | C = 0.95 | C = 0.90 | | | |
| 3828599 | 45506 | 150430306 | T/C | T = 0.55 | T = 0.55 | 0.9993 | 1.00 | T |
| | | | | C = 0.45 | C = 0.45 | | | |
| 8177417 | 45543 | 150430343 | G/C | G = 1.00 | G = 1.00 | | | |
| | | | | C = 0.00 | C = 0.00 | | | |
| 3792797 | 45601 | 150430401 | T/G | T = 0.46 | T = 0.52 | 0.0520 | 1.27 | T |
| | | | | G = 0.54 | G = 0.48 | | | |
| 8177418 | 45652 | 150430452 | T/C | T = 0.00 | T = 0.00 | | | |
| | | | | C = 1.00 | C = 1.00 | | | |
| 8177419 | 45756 | 150430556 | A/— | A = 0.00 | A = 0.00 | | | |
| | | | | — = 1.00 | — = 1.00 | | | |
| 8177420 | 45826 | 150430626 | T/C | T = 1.00 | T = 1.00 | | | |
| | | | | C = 0.00 | C = 0.00 | | | |
| 8177421 | 45974 | 150430774 | C/G | C = 0.07 | C = 0.02 | | | |
| | | | | G = 0.93 | G = 0.98 | | | |
| 4958872 | 46044 | 150430844 | T/C | T = 0.81 | T = 0.81 | 0.9167 | 0.98 | T |
| | | | | C = 0.19 | C = 0.19 | | | |
| 3792796 | 46200 | 150431000 | C/G | C = 0.40 | C = 0.41 | 0.5382 | 1.08 | C |
| | | | | G = 0.60 | G = 0.59 | | | |
| 8177422 | 46218 | 150431018 | A/G | A = 1.00 | A = 1.00 | | | |
| | | | | G = 0.00 | G = 0.00 | | | |
| 8177423 | 46221 | 150431021 | C/T | C = 1.00 | C = 1.00 | | | |
| | | | | T = 0.00 | T = 0.00 | | | |
| 4958434 | 46280 | 150431080 | C/T | C = 0.86 | C = 0.83 | 0.1864 | 0.79 | T |
| | | | | T = 0.14 | T = 0.17 | | | |
| 8177424 | 46330 | 150431138 | —/ | — = 1.00 | — = 0.98 | | | |
| | | | GAGTCCTGG | GAGTCCTGG = 0.00 | GAGTCCTGG = 0.02 | | | |
| 8177425 | 46583 | 150431383 | T/C | T = 0.02 | T = 0.03 | 0.5080 | 1.30 | T |
| | | | | C = 0.98 | C = 0.97 | | | |
| 8177426 | 46650 | 150431450 | A/G | A = 0.31 | A = 0.36 | 0.0447 | 1.29 | A |
| | | | | G = 0.69 | G = 0.64 | | | |
| 8177427 | 46721 | 150431521 | A/G | A = 0.26 | A = 0.32 | 0.0296 | 1.33 | A |
| | | | | G = 0.74 | G = 0.68 | | | |
| 8177429 | 46808 | 150431608 | G/C | G = 0.91 | G = 0.95 | 0.0132 | 1.89 | G |
| | | | | C = 0.09 | C = 0.05 | | | |
| 6889737 | 47242 | 150432042 | C/A | C = 1.00 | C = 1.00 | | | |
| | | | | A = 0.00 | A = 0.00 | | | |
| 3792795 | 47512 | 150432312 | G/A | G = 0.89 | G = 0.97 | 0.0000 | 3.53 | G |
| | | | | A = 0.11 | A = 0.03 | | | |
| 8177430 | 47600 | 150432400 | T/C | T = 0.01 | T = 0.01 | | | |
| | | | | C = 0.99 | C = 0.99 | | | |
| 8177431 | 47706 | 150432506 | A/G | A = 0.71 | A = 0.70 | 0.6316 | 0.94 | G |
| | | | | G = 0.29 | G = 0.30 | | | |
| 4958873 | 47806 | 150432606 | A/G | A = 0.31 | A = 0.38 | 0.0279 | 1.32 | A |
| | | | | G = 0.69 | G = 0.62 | | | |
| 8177432 | 47978 | 150432778 | T/G | T = 1.00 | T = 1.00 | | | |
| | | | | G = 0.00 | G = 0.00 | | | |
| 8177433 | 48021 | 150432821 | T/C | T = 0.26 | T = 0.23 | 0.2375 | 0.85 | C |
| | | | | C = 0.74 | C = 0.77 | | | |
| 8177434 | 48025 | 150432825 | G/A | G = 0.00 | G = 0.00 | | | |
| | | | | A = 1.00 | A = 1.00 | | | |
| 8177435 | 48093 | 150432893 | T/G | T = 0.81 | T = 0.79 | 0.4469 | 0.89 | G |
| | | | | G = 0.19 | G = 0.21 | | | |
| 3763011 | 48413 | 150433213 | T/C | T = 0.01 | T = 0.02 | | | |
| | | | | C = 0.99 | C = 0.98 | | | |
| 8177436 | 48933 | 150433733 | C/T | C = 0.00 | C = 0.00 | | | |
| | | | | T = 1.00 | T = 1.00 | | | |
| 8177437 | 49097 | 150433897 | C/G | C = 0.17 | C = 0.07 | ˜0.00001 | 0.38 | G |
| | | | | G = 0.83 | G = 0.93 | | | |
| 4958874 | 49105 | 150433905 | T/C | T = 0.44 | T = 0.49 | 0.0880 | 1.24 | T |
| | | | | C = 0.56 | C = 0.51 | | | |
| 8177439 | 49570 | 150434370 | G/A | G = | G = 1.00 | | | |
| | | | | A = | A = 0.00 | | | |
| 8177440 | 49591 | 150434391 | C/T | C = 1.00 | C = 1.00 | | | |
| | | | | T = 0.00 | T = 0.00 | | | |
| 8177441 | 49704 | 150434504 | G/C | G = 1.00 | G = 1.00 | | | |
| | | | | C = 0.00 | C = 0.00 | | | |
| 8177442 | 49705 | 150434505 | A/T | A = 1.00 | A = 1.00 | | | |
| | | | | T = 0.00 | T = 0.00 | | | |
| 8177443 | 49798 | 150434598 | C/T | C = 1.00 | C = 1.00 | | | |
| | | | | T = 0.00 | T = 0.00 | | | |
| 869975 | 50082 | 150434882 | A/G | A = 0.37 | A = 0.25 | ˜0.00001 | 0.57 | G |
| | | | | G = 0.63 | G = 0.75 | | | |
| 869976 | 50147 | 150434947 | G/A | G = 0.00 | G = 0.00 | | | |
| | | | | A = 1.00 | A = 1.00 | | | |
| 8177444 | 50356 | 150435156 | A/T | A = 1.00 | A = 1.00 | | | |
| | | | | T = 0.00 | T = 0.00 | | | |
| 8177445 | 50725 | 150435525 | T/C | T = 1.00 | T = 1.00 | | | |
| | | | | C = 0.00 | C = 0.00 | | | |
| 7721469 | 50968 | 150435768 | C/A | C = 0.00 | C = 0.00 | | | |
| | | | | A = 1.00 | A = 1.00 | | | |
| 8177446 | 51029 | 150435829 | A/C | A = 1.00 | A = 1.00 | | | |
| | | | | C = 0.00 | C = 0.00 | | | |
| 7704191 | 51086 | 150435886 | T/C | T = 1.00 | T = 1.00 | | | |
| | | | | C = 0.00 | C = 0.00 | | | |
| 8177447 | 51166 | 150435966 | T/C | T = 0.27 | T = 0.35 | 0.0030 | 1.50 | T |
| | | | | C = 0.73 | C = 0.65 | | | |
| 11548 | 51493 | 150436293 | C/T | C = 0.90 | C = 0.95 | 0.0002 | 2.40 | C |
| | | | | T = 0.10 | T = 0.05 | | | |
| 2230303 | 51539 | 150436339 | G/T | G = 0.00 | G = 0.01 | | | |
| | | | | T = 1.00 | T = 0.99 | | | |
| 7722386 | 51562 | 150436362 | G/A | G = 0.00 | G = 0.00 | | | |
| | | | | A = 1.00 | A = 1.00 | | | |
| 8177448 | 51645 | 150436445 | G/A | G = 0.99 | G = 0.99 | | | |
| | | | | A = 0.01 | A = 0.01 | | | |
| 8177449 | 51649 | 150436449 | T/C | T = 0.17 | T = 0.14 | 0.2009 | 0.80 | C |
| | | | | C = 0.83 | C = 0.86 | | | |
| 2070593 | 51650 | 150436450 | T/C | T = 0.31 | T = 0.28 | 0.2540 | 0.86 | C |
| | | | | C = 0.69 | C = 0.72 | | | |
| 8177450 | 51656 | 150436456 | G/A | G = 0.00 | G = 0.00 | | | |
| | | | | A = 1.00 | A = 1.00 | | | |
| 8177451 | 51657 | 150436457 | T/C | T = 0.00 | T = 0.00 | | | |
| | | | | C = 1.00 | C = 1.00 | | | |
| 8177452 | 52009 | 150436809 | G/A | G = 0.00 | G = 0.00 | | | |
| | | | | A = 1.00 | A = 1.00 | | | |
| 8177453 | 52143 | 150436943 | A/C | A = 0.00 | A = 0.00 | | | |
| | | | | C = 1.00 | C = 1.00 | | | |
| 8177454 | 52349 | 150437149 | G/C | G = 0.99 | G = 0.98 | | | |
| | | | | C = 0.01 | C = 0.02 | | | |
| 3763010 | 52421 | 150437221 | C/T | C = 0.76 | C = 0.80 | 0.1337 | 1.30 | C |
| | | | | T = 0.24 | T = 0.20 | | | |
| 8177455 | 52532 | 150437332 | A/G | A = 0.00 | A = 0.00 | | | |
| | | | | G = 1.00 | G = 1.00 | | | |
| 8177456 | 52682 | 150437482 | A/G | A = 0.45 | A = 0.50 | 0.1098 | 1.22 | A |
| | | | | G = 0.55 | G = 0.50 | | | |
| 736775 | 53058 | 150437858 | T/C | T = 0.56 | T = 0.59 | 0.3945 | 1.12 | T |
| | | | | C = 0.44 | C = 0.41 | | | |
| 2277940 | 53187 | 150437987 | T/C | T = 0.92 | T = 0.97 | 0.0004 | 2.75 | T |
| | | | | C = 0.08 | C = 0.03 | | | |
| 8177458 | 53377 | 150438177 | G/A | G = 0.98 | G = 0.98 | 0.9445 | 1.03 | G |
| | | | | A = 0.02 | A = 0.02 | | | |
| 8177834 | 53699 | 150438499 | G/A | G = 0.93 | G = 0.89 | 0.0113 | 0.58 | A |
| | | | | A = 0.07 | A = 0.11 | | | |
| 3924 | 53845 | 150438645 | A/G | A = 0.75 | A = 0.74 | 0.7350 | 0.95 | G |
| | | | | G = 0.25 | G = 0.26 | | | |
| 2233312 | 53920 | 150438720 | A/G | A = 0.00 | A = 0.00 | | | |
| | | | | G = 1.00 | G = 1.00 | | | |
| 2233311 | 53929 | 150438729 | T/G | T = 0.15 | T = 0.20 | 0.0106 | 1.49 | T |
| | | | | G = 0.85 | G = 0.80 | | | |
| 2233310 | 55473 | 150440273 | T/C | T = 0.00 | T = 0.00 | | | T |
| | | | | C = 1.00 | C = 1.00 | | | |
| 2233309 | 55690 | 150440490 | A/G | A = 0.00 | A = 0.00 | | | |
| | | | | G = 1.00 | G = 1.00 | | | |
| 4958875 | 55850 | 150440650 | A/G | A = 0.56 | A = 0.53 | 0.2131 | 0.86 | G |
| | | | | G = 0.44 | G = 0.47 | | | |
| 2233308 | 56761 | 150441561 | C/T | C = 1.00 | C = 1.00 | | | |
| | | | | T = 0.00 | T = 0.00 | | | |
| 2233307 | 56840 | 150441640 | C/G | C = 0.00 | C = 0.00 | | | |
| | | | | G = 1.00 | G = 1.00 | | | |
| 2233306 | 57000 | 150441800 | C/T | C = 1.00 | C = 1.00 | | | |
| | | | | T = 0.00 | T = 0.00 | | | |
| 2233305 | 57116 | 150441916 | T/G | T = | T = 0.27 | | | |
| | | | | G = | G = 0.73 | | | |
| 2233304 | 58419 | 150443219 | T/G | T = 0.00 | T = 0.01 | | | |
| | | | | G = 1.00 | G = 0.99 | | | |
| 2233303 | 58420 | 150443220 | C/T | C = 1.00 | C = 1.00 | | | |
| | | | | T = 0.00 | T = 0.00 | | | |
| 2233302 | 58808 | 150443608 | G/C | G = 0.98 | G = 0.87 | ˜0.00001 | 0.14 | C |
| | | | | C = 0.02 | C = 0.13 | | | |
| 2287719 | 58906 | 150443706 | A/G | A = 0.00 | A = 0.00 | | | |
| | | | | G = 1.00 | G = 1.00 | | | |
| 2287720 | 59048 | 150443848 | C/T | C = 0.39 | C = 0.42 | 0.2852 | 1.14 | C |
| | | | | T = 0.61 | T = 0.58 | | | |
| 7727034 | 59187 | 150443987 | C/G | C = 0.24 | C = 0.30 | 0.0374 | 1.36 | C |
| | | | | G = 0.76 | G = 0.70 | | | |
| 7727250 | 59361 | 150444161 | C/T | C = 0.33 | C = 0.43 | 0.0003 | 1.57 | C |
| | | | | T = 0.67 | T = 0.57 | | | |
| 7709800 | 61218 | 150446018 | G/A | G = 1.00 | G = 1.00 | | | |
| | | | | A = 0.00 | A = 0.00 | | | |
| 3840312 | 61700 | 150446500 | G/— | G = 0.54 | G = 0.50 | 0.1346 | 0.84 | — |
| | | | | — = 0.46 | — = 0.50 | | | |
| 2287721 | 62290 | 150447090 | G/A | G = 1.00 | G = 1.00 | | | |
| | | | | A = 0.00 | A = 0.00 | | | |
| 6875293 | 62596 | 150447396 | T/C | T = 0.00 | T = 0.00 | | | |
| | | | | C = 1.00 | C = 1.00 | | | |
| 3805434 | 64049 | 150448849 | G/C | G = 0.93 | G = 0.87 | 0.0009 | 0.51 | C |
| | | | | C = 0.07 | C = 0.13 | | | |
| 2080982 | 66077 | 150450877 | G/T | G = 0.02 | G = 0.01 | | | |
| | | | | T = 0.98 | T = 0.99 | | | |
| 2080983 | 66079 | 150450879 | G/T | G = 1.00 | G = 1.00 | | | |
| | | | | T = 0.00 | T = 0.00 | | | |
| 2287722 | 66086 | 150450886 | T/C | T = 0.00 | T = 0.00 | | | |
| | | | | C = 1.00 | C = 1.00 | | | |
| 2233301 | 66115 | 150450915 | T/G | T = 0.00 | T = 0.00 | | | |
| | | | | G = 1.00 | G = 1.00 | | | |
| 2233300 | 66150 | 150450950 | C/G | C = 0.00 | C = 0.00 | | | |
| | | | | G = 1.00 | G = 1.00 | | | |
| 4958876 | 66475 | 150451275 | C/A | C = | C = 0.95 | | | |
| | | | | A = | A = 0.05 | | | |
| 2233299 | 69177 | 150453977 | A/G | A = 0.48 | A = 0.49 | 0.7917 | 1.03 | A |
| | | | | G = 0.52 | G = 0.51 | | | |
| 2233298 | 69210 | 150454010 | A/G | A = 0.00 | A = 0.00 | | | |
| | | | | G = 1.00 | G = 1.00 | | | |
| 2287723 | 69312 | 150454112 | T/G | T = 1.00 | T = 1.00 | | | |
| | | | | G = 0.00 | G = 0.00 | | | |
| 2161359 | 70244 | 150455044 | A/G | A = 0.53 | A = 0.51 | 0.5813 | 0.94 | G |
| | | | | G = 0.47 | G = 0.49 | | | |
| 7734456 | 70882 | 150455682 | G/C | G = 0.53 | G = 0.60 | 0.0188 | 1.32 | G |
| | | | | C = 0.47 | C = 0.40 | | | |
| 4292439 | 71905 | 150456705 | T/C | T = 0.87 | T = 0.84 | 0.1343 | 0.77 | C |
| | | | | C = 0.13 | C = 0.16 | | | |
| 4958878 | 72294 | 150457094 | A/T | A = | A = 0.12 | | | |
| | | | | T = | T = 0.88 | | | |
| 6862024 | 72581 | 150457381 | A/G | A = 0.80 | A = 0.78 | 0.4512 | 0.89 | G |
| | | | | G = 0.20 | G = 0.22 | | | |
| 3834819 | 72786 | 150457589 | —/CA | — = 0.00 | — = 0.00 | | | |
| | | | | CA = 1.00 | CA = 1.00 | | | |
| 2233297 | 72950 | 150457750 | G/A | G = 0.04 | G = 0.05 | 0.3215 | 1.32 | G |
| | | | | A = 0.96 | A = 0.95 | | | |
| 2233296 | 73106 | 150457906 | G/A | G = 1.00 | G = 1.00 | | | |
| | | | | A = 0.00 | A = 0.00 | | | |
| 2233295 | 73162 | 150457962 | T/C | T = 0.00 | T = 0.00 | | | |
| | | | | C = 1.00 | C = 1.00 | | | |
| 2233294 | 73273 | 150458073 | G/T | G = 0.24 | G = 0.23 | 0.7059 | 0.95 | T |
| | | | | T = 0.76 | T = 0.77 | | | |
| 7713028 | 74131 | 150458931 | G/A | G = 0.9 | G = 0.85 | 0.0238 | 0.66 | A |
| | | | | A = 0.1 | A = 0.15 | | | |
| 7713223 | 74406 | 150459206 | T/C | T = 0.93 | T = 0.88 | 0.0047 | 0.56 | C |
| | | | | C = 0.07 | C = 0.12 | | | |
| 7713567 | 74665 | 150459465 | C/T | C = 0.61 | C = 0.63 | 0.4135 | 1.10 | C |
| | | | | T = 0.39 | T = 0.37 | | | |
| 888989 | 74740 | 150459540 | T/C | T = 0.90 | T = 0.86 | 0.0352 | 0.67 | C |
| | | | | C = 0.10 | C = 0.14 | | | |
| 2233293 | 75382 | 150460182 | A/G | A = 0.00 | A = 0.00 | | | |
| | | | | G = 1.00 | G = 1.00 | | | |
| 3749657 | 75400 | 150460200 | G/T | G = 1.00 | G = 1.00 | | | |
| | | | | T = 0.00 | T = 0.00 | | | |
| 2233292 | 75460 | 150460260 | G/A | G = | G = 1.00 | | | |
| | | | | A = | A = 0.00 | | | |
| 2112635 | 75863 | 150460663 | C/T | C = 0.35 | C = 0.36 | 0.7381 | 1.04 | C |
| | | | | T = 0.65 | T = 0.64 | | | |
| 871269 | 76098 | 150460898 | T/C | T = 0.47 | T = 0.42 | 0.0796 | 0.81 | C |
| | | | | C = 0.53 | C = 0.58 | | | |
| 3792794 | 78432 | 150463232 | A/G | A = 0.21 | A = 0.10 | ˜0.00001 | 0.41 | G |
| | | | | G = 0.79 | G = 0.90 | | | |
| 6579837 | 78604 | 150463404 | G/T | G = 0.89 | G = 0.91 | 0.1630 | 1.33 | G |
| | | | | T = 0.11 | T = 0.09 | | | |
| 3805433 | 79190 | 150463990 | C/G | C = 0.28 | C = 0.28 | 0.9484 | 0.99 | C |
| | | | | G = 0.72 | G = 0.72 | | | |
| 5872186 | 79870 | 150464670 | —/A | — = 0.33 | — = 0.35 | 0.5526 | 1.08 | — |
| | | | | A = 0.67 | A = 0.65 | | | |
| 2233291 | 79928 | 150464728 | G/C | G = 1.00 | G = 1.00 | | | |
| | | | | C = 0.00 | C = 0.00 | | | |
| 2233290 | 80213 | 150465013 | G/C | G = 0.14 | G = 0.13 | 0.8704 | 0.97 | C |
| | | | | C = 0.86 | C = 0.87 | | | |
| 2233289 | 80227 | 150465027 | C/T | C = 1.00 | C = 0.99 | | | |
| | | | | T = 0.00 | T = 0.010 | | | |
| 4958435 | 81994 | 150466794 | T/G | T = 0.68 | T = 0.63 | 0.0549 | 0.79 | G |
| | | | | G = 0.32 | G = 0.37 | | | |
| 4958880 | 82187 | 150466987 | C/A | C = 0.75 | C = 0.84 | 0.0002 | 1.76 | C |
| | | | | A = 0.25 | A = 0.16 | | | |
| 1422673 | 82698 | 150467498 | T/C | T = 0.45 | T = 0.32 | ˜0.00001 | 0.59 | C |
| | | | | C = 0.55 | C = 0.68 | | | |
| 2042234 | 82841 | 150467641 | A/G | A = 0.91 | A = 0.93 | 0.1485 | 1.37 | A |
| | | | | G = 0.09 | G = 0.07 | | | |
| 3805432 | 83214 | 150468014 | A/G | A = 0.04 | A = 0.07 | 0.0188 | 1.93 | A |
| | | | | G = 0.96 | G = 0.93 | | | |
| 3805431 | 83249 | 150468049 | T/C | T = 0.06 | T = 0.02 | | | |
| | | | | C = 0.94 | C = 0.98 | | | |
| 2233288 | 83485 | 150468285 | T/C | T = 0.00 | T = 0.00 | | | |
| | | | | C = 1.00 | C = 1.00 | | | |
| 2233287 | 83807 | 150468607 | C/T | C = 0.90 | C = 0.92 | 0.2555 | 1.32 | C |
| | | | | T = 0.10 | T = 0.08 | | | |
| 3815720 | 83907 | 150468707 | G/A | G = 0.99 | G = 0.97 | | | |
| | | | | A = 0.01 | A = 0.03 | | | |
| 3792792 | 84216 | 150469016 | A/G | A = 1.00 | A = 0.99 | | | |
| | | | | G = 0.00 | G = 0.01 | | | |
| 3792791 | 84656 | 150469456 | A/G | A = 0.00 | A = 0.00 | | | |
| | | | | G = 1.00 | G = 1.00 | | | |
| 2303018 | 85448 | 150470248 | G/A | G = 1.00 | G = 1.00 | | | |
| | | | | A = 0.00 | A = 0.00 | | | |
| 3792790 | 85881 | 150470681 | G/T | G = 0.49 | G = 0.49 | 0.9686 | 1.00 | G |
| | | | | T = 0.51 | T = 0.51 | | | |
| 4958436 | 86539 | 150471339 | T/C | T = 0.88 | T = 0.92 | 0.0083 | 1.76 | T |
| | | | | C = 0.12 | C = 0.08 | | | |
| 2233286 | 86796 | 150471596 | T/C | T = 0.00 | T = 0.00 | | | |
| | | | | C = 1.00 | C = 1.00 | | | |
| 2233285 | 87057 | 150471857 | G/A | G = 1.00 | C = 1.00 | | | |
| | | | | A = 0.00 | A = 0.00 | | | |
| 7732451 | 87922 | 150472722 | T/C | T = 0.90 | T = 0.92 | 0.2349 | 1.29 | T |
| | | | | C = 0.10 | C = 0.08 | | | |
| 2233284 | 88098 | 150472898 | T/C | T = 0.00 | T = 0.00 | | | |
| | | | | C = 1.00 | C = 1.00 | | | |
| 1422674 | 89319 | 150474119 | G/T | G = | G = | | | |
| | | | | T = | T = | | | |
| 3792789 | 89678 | 150474478 | C/T | C = 0.42 | C = 0.42 | 0.9873 | 1.00 | C |
| | | | | T = 0.58 | T = 0.58 | | | |
| 4562032 | 90026 | 150474826 | C/A | C = | C = 1.00 | | | |
| | | | | A = | A = 0.00 | | | |
| 6865077 | 90033 | 150474833 | G/A | G = 1.00 | G = 1.00 | | | |
| | | | | A = 0.00 | A = 0.00 | | | |
| 1559126 | 90114 | 150474914 | C/G | C = 1.00 | C = 1.00 | | | |
| | | | | G = 0.00 | G = 0.00 | | | |
| 3792788 | 90326 | 150475126 | T/C | T = 0.00 | T = 0.00 | | | |
| | | | | C = 1.00 | C = 1.00 | | | |
| 1559127 | 90463 | 150475263 | T/C | T = 0.94 | T = 0.94 | 0.6080 | 1.14 | T |
| | | | | C = 0.06 | C = 0.06 | | | |
| 3792786 | 90548 | 150475348 | A/G | A = 0.98 | A = 0.99 | | | |
| | | | | G = 0.02 | G = 0.01 | | | |
| 6880110 | 90800 | 150475600 | A/G | A = 0.91 | A = 0.92 | 0.5433 | 1.14 | A |
| | | | | G = 0.09 | G = 0.08 | | | |
| 6861227 | 90838 | 150475638 | G/T | G = 0.26 | G = 0.23 | 0.1843 | 0.83 | T |
| | | | | T = 0.74 | T = 0.77 | | | |
| 3805430 | 91400 | 150476200 | C/G | C = 0.02 | C = 0.05 | | | |
| | | | | G = 0.98 | G = 0.95 | | | |
| 1862364 | 92086 | 150476886 | A/G | A = 0.91 | A = 0.92 | 0.5575 | 1.13 | A |
| | | | | G = 0.09 | G = 0.08 | | | |
| 4958881 | 93946 | 150478746 | T/C | T = 0.91 | T = 0.91 | 0.9701 | 1.01 | T |
| | | | | C = 0.09 | C = 0.09 | | | |
| 3792785 | 95360 | 150480160 | A/G | A = 0.92 | A = 0.93 | 0.5448 | 1.16 | A |
| | | | | G = 0.08 | G = 0.07 | | | |
| 6869605 | 96576 | 150481376 | A/C | A = 0.90 | A = 0.89 | 0.7189 | 0.93 | C |
| | | | | C = 0.10 | C = 0.11 | | | |
| 6870205 | 96721 | 150481521 | A/G | A = 0.00 | A = 0.07 | | | |
| | | | | G = 1.00 | G = 0.93 | | | |
| 4246047 | 98316 | 150483116 | T/A | T = 0.94 | T = 0.96 | 0.2613 | 1.37 | T |
| | | | | A = 0.06 | A = 0.04 | | | |
| 4958882 | 98497 | 150483297 | C/G | C = 0.88 | C = 0.89 | 0.7723 | 1.06 | C |
| | | | | G = 0.12 | G = 0.11 | | | |
| 3792784 | 99382 | 150484182 | C/T | C = 0.00 | C = 0.04 | | | |
| | | | | T = 1.00 | T = 0.96 | | | |
| 3792783 | 99442 | 150484242 | T/C | T = 0.85 | T = 0.87 | 0.2391 | 1.22 | T |
| | | | | C = 0.15 | C = 0.13 | | | |
| 5872188 | 99764 | 150484565 | —/AG | — = 0.90 | — = 0.91 | 0.5908 | 1.11 | — |
| | | | | AG = 0.10 | AG = 0.09 | | | |

[0304] Allelotyping results were considered particularly significant with a calculated p-value of less than or equal to 0.05 for allelotype results. These values are indicated in bold. The allelotyping p-values were plotted in FIG. 4. The position of each SNP on the chromosome is presented on the x-axis. The y-axis gives the negative logarithm (base 10) of the p-value comparing the estimated allele in the case group to that of the control group. The minor allele frequency of the control group for each SNP designated by an X or other symbol on the graphs in FIG. 4 can be determined by consulting Table 27. For example, the left-most X on the left graph is at position 150385031. By proceeding down the Table from top to bottom and across the graphs from left to right the allele frequency associated with each symbol shown can be determined.

[0305] To aid the interpretation, multiple lines have been added to the graph. The broken horizontal lines are drawn at two common significance levels, 0.05 and 0.01. The vertical broken lines are drawn every 20 kb to assist in the interpretation of distances between SNPs. Two other lines are drawn to expose linear trends in the association of SNPs to the disease. The light gray line (or generally bottom-most curve) is a nonlinear smoother through the data points on the graph using a local polynomial regression method (W. S. Cleveland, E. Grosse and W. M. Shyu (1992) Local regression models. Chapter 8 of Statistical Models in S eds J. M. Chambers and T. J. Hastie, Wadsworth & Brooks/Cole.). The black line provides a local test for excess statistical significance to identify regions of association. This was created by use of a 10 kb sliding window with 1 kb step sizes. Within each window, a chi-square goodness of fit test was applied to compare the proportion of SNPs that were significant at a test wise level of 0.01, to the proportion that would be expected by chance alone (0.05 for the methods used here). Resulting p-values that were less than 104 were truncated at that value.

[0306] Finally, the exons and introns of the genes in the covered region are plotted below each graph at the appropriate chromosomal positions. The gene boundary is indicated by the broken horizontal line. The exon positions are shown as thick, unbroken bars. An arrow is place at the 3′ end of each gene to show the direction of transcription.

### Example 10

### In Vitro Production of Target Polypeptides

[0307] cDNA is cloned into a pIVEX 2.3-MCS vector (Roche Biochem) using a directional cloning method. A cDNA insert is prepared using PCR with forward and reverse primers having 5′ restriction site tags (in frame) and 5-6 additional nucleotides in addition to 3′ gene-specific portions, the latter of which is typically about twenty to about twenty-five base pairs in length. A Sal I restriction site is introduced by the forward primer and a Sma I restriction site is introduced by the reverse primer. The ends of PCR products are cut with the corresponding restriction enzymes (i.e., Sal I and Sma I) and the products are gel-purified. The pIVEX 2.3-MCS vector is linearized using the same restriction enzymes, and the fragment with the correct sized fragment is isolated by gel-purification. Purified PCR product is ligated into the linearized pIVEX 2.3-MCS vector and E. coli cells transformed for plasmid amplification. The newly constructed expression vector is verified by restriction mapping and used for protein production.

[0308] E. coli lysate is reconstituted with 0.25 ml of Reconstitution Buffer, the Reaction Mix is reconstituted with 0.8 ml of Reconstitution Buffer; the Feeding Mix is reconstituted with 10.5 ml of Reconstitution Buffer; and the Energy Mix is reconstituted with 0.6 ml of Reconstitution Buffer. 0.5 ml of the Energy Mix was added to the Feeding Mix to obtain the Feeding Solution. 0.75 ml of Reaction Mix, 50 μl of Energy Mix, and 10 μg of the template DNA is added to the E. coli lysate.

[0309] Using the reaction device (Roche Biochem), 1 ml of the Reaction Solution is loaded into the reaction compartment. The reaction device is turned upside-down and 10 ml of the Feeding Solution is loaded into the feeding compartment. All lids are closed and the reaction device is loaded into the RTS500 instrument. The instrument is run at 30° C. for 24 hours with a stir bar speed of 150 rpm. The pIVEX 2.3 MCS vector includes a nucleotide sequence that encodes six consecutive histidine amino acids on the C-terminal end of the target polypeptide for the purpose of protein purification. Target polypeptide is purified by contacting the contents of reaction device with resin modified with Ni²⁺ ions. Target polypeptide is eluted from the resin with a solution containing free Ni²⁺ ions.

### Example 11

### Cellular Production of Target Polypeptides

[0310] Nucleic acids are cloned into DNA plasmids having phage recombination cites and target polypeptides are expressed therefrom in a variety of host cells. Alpha phage genomic DNA contains short sequences known as attP sites, and E. coli genomic DNA contains unique, short sequences known as attB sites. These regions share homology, allowing for integration of phage DNA into E. coli via directional, site-specific recombination using the phage protein Int and the E. coli protein IHF. Integration produces two new aft sites, L and R, which flank the inserted prophage DNA. Phage excision from E. coli genomic DNA can also be accomplished using these two proteins with the addition of a second phage protein, Xis. DNA vectors have been produced where the integration/excision process is modified to allow for the directional integration or excision of a target DNA fragment into a backbone vector in a rapid in vitro reaction (Gateway™ Technology (Invitrogen, Inc.)).

[0311] A first step is to transfer the nucleic acid insert into a shuttle vector that contains attL sites surrounding the negative selection gene, ccdB (e.g. pENTER vector, Invitrogen, Inc.). This transfer process is accomplished by digesting the nucleic acid from a DNA vector used for sequencing, and to ligate it into the multicloning site of the shuttle vector, which will place it between the two attL sites while removing the negative selection gene ccdB. A second method is to amplify the nucleic acid by the polymerase chain reaction (PCR) with primers containing attB sites. The amplified fragment then is integrated into the shuttle vector using Int and IHF. A third method is to utilize a topoisomerase-mediated process, in which the nucleic acid is amplified via PCR using gene-specific primers with the 5′ upstream primer containing an additional CACC sequence (e.g., TOPO® expression kit (Invitrogen, Inc.)). In conjunction with Topoisomerase I, the PCR amplified fragment can be cloned into the shuttle vector via the attL sites in the correct orientation.

[0312] Once the nucleic acid is transferred into the shuttle vector, it can be cloned into an expression vector having attR sites. Several vectors containing attR sites for expression of target polypeptide as a native polypeptide, N-fusion polypeptide, and C-fusion polypeptides are commercially available (e.g., pDEST (Invitrogen, Inc.)), and any vector can be converted into an expression vector for receiving a nucleic acid from the shuttle vector by introducing an insert having an attR site flanked by an antibiotic resistant gene for selection using the standard methods described above. Transfer of the nucleic acid from the shuttle vector is accomplished by directional recombination using Int, IHF, and Xis (LR clonase). Then the desired sequence can be transferred to an expression vector by carrying out a one hour incubation at room temperature with Int, IHF, and Xis, a ten minute incubation at 37° C. with proteinase K, transforming bacteria and allowing expression for one hour, and then plating on selective media. Generally, 90% cloning efficiency is achieved by this method. Examples of expression vectors are pDEST 14 bacterial expression vector with att7 promoter, pDEST 15 bacterial expression vector with a T7 promoter and a N-terminal GST tag, pDEST 17 bacterial vector with a T7 promoter and a N-terminal polyhistidine affinity tag, and pDEST 12.2 mammalian expression vector with a CMV promoter and neo resistance gene. These expression vectors or others like them are transformed or transfected into cells for expression of the target polypeptide or polypeptide variants. These expression vectors are often transfected, for example, into murine-transformed a adipocyte cell line 3T3-L1, (ATCC), human embryonic kidney cell line 293, and rat cardiomyocyte cell line H9C2.

Representative Nucleotide and Amino Acid Sequences

[0313] Following is a genomic nucleotide sequence for a CTEP region. The genomic nucleotide sequence is set forth in SEQ ID NO: 1. The following nucleotide representations are used throughout: “A” or “a” is adenosine, adenine, or adenylic acid; “C” or “c” is cytidine, cytosine, or cytidylic acid; “G” or “g” is guanosine, guanine, or guanylic acid; “T” or “t” is thymidine, thymine, or thymidylic acid; and “I” or “i” is inosine, hypoxanthine, or inosinic acid. Exons are indicated in italicized lower case type, introns are depicted in normal text lower case type, and polymorphic sites are depicted in bold upper case type. SNPs are designated by the following convention: “R” represents A or G, “M” represents A or C; “W” represents A or T; “Y” represents C or T; “S” represents C or G; “K” represents G or T; “V” represents A, C or G; “H” represents A, C, or T; “D” represents A, G, or T; “B” represents C, G, or T; and “N” represents A, G, C, or T.

>16: 56742951-56841200

| | |
|---|---|
| 1 | tgtctaaaaa ttattatggc tgaaacatac ttatcatttg |
| | ttttctgtag tagaaaatgg |
| 61 | cataatatga gaaggcctac tttgtaatag ttgtttgctt |
| | tacttaatat ttttcaaatc |
| 121 | agccatctgt gtgaagactc aatatcaagt taggccttta |
| | aaagggggaa aataattcaa |
| 181 | aaccactggc agctgtggtt ttccRgcctt ttctattggt |
| | tgaactctgt aataaatgca |
| 241 | ggaccctaca tatacaaaag gtactgtttt ccaaattcac |
| | gtatgtatta gcatttacct |
| 301 | ttaaagttct catccgtcag aaaaacggtg aacacagcat |
| | tcagtatatt tattttggtt |
| 361 | tagttacaca gtgtcaaaaa gttctgatgt atatggataa |
| | gtagatgcac tttttgctgt |
| 421 | tttgtttgtt taaacagctt gctttaatta tctcaagcta |
| | cttggcagga acacctttat |
| 481 | tccaggtttc gcataatcag ttattctggc aagagtagat |
| | taacacgtta gtgatctcca |
| 541 | atagacagat tatatgttaa tattatttga ggccattatt |
| | tttaagtaca atttagacgg |
| 601 | agtttcaaat agattttaaa aatgagattt gtataaaaga |
| | gtgtgcagtc cctatggtgt |
| 661 | taaaatcact gatatggagg agaagagggg ttggaattgt |
| | gacactgtgg cagcagatga |
| 721 | ccttggacaa gtcagttttt cagactttcc tcccttaaaa |
| | tagggatact aaatctcaca |
| 781 | gggtggttgt gtataatgtc acccacacgc catctcctct |
| | ataactgcat ttgtatgcca |
| 841 | ggaaattgtc tgtgaaggct tcagtttaga atagcttcat |
| | attattttgg ggcactgctg |
| 901 | ggtgattttg gttaaggctg gccttgggag ttctctgagt |
| | tttctctgaa accaaactca |
| 961 | atttggttgt aggttccctg tttgctgttt gttgctttta |
| | gtaataggag tcagtcagtt |
| 1021 | tacctgggag ttaagtttgg actggagata atttgccatt |
| | cttttttttt tttttttttt |
| 1081 | ttttttttga gatagggtct cactctgtcg cccaggctgg |
| | agtgcagtga catgatcttg |
| 1141 | gctcactgca acctctgcct ccctggttca agcgattccc |
| | ctgcctcagc ctcctgagta |
| 1201 | gtttgggtta caggcacaag ccaccacgcc cagctaattt |
| | ttgcattttt agtagagatg |
| 1261 | gggtttcacc atgttggcca ggctggtctc gaacccctga |
| | cctcaggtga tctgcccgcc |
| 1321 | ttggcctccc acagtgcttg gattacaggc atgagccacc |
| | atgcccagcc gataatttgc |
| 1381 | cattctgtat ttatttgcgt gttagagacc agttaaagtt |
| | aagacacttt ctaaatagaa |
| 1441 | gtcttgtata tggggctttt gagaaagtgt tttcccgtga |
| | tgctgggggg aaacacacat |
| 1501 | attcaaatta cttgtataaa acagtttatt ctgtgtttag |
| | gaacttgtag gggtgaaatg |
| 1561 | ctgacctgtg ttactctttc tttccatgat cagcRtccag |
| | aggaccagag gttaatttat |
| 1621 | tctgggaagc tgttgttgga tcaccaatgt ctcagggact |
| | tgcttccaaa ggtacatcac |
| 1681 | ttacacatta acttctgaat gtttttaagc actcaccagg |
| | ttaggttcag gtccttaagt |
| 1741 | accttcgtat tacttttagc aggaaaaacg gcatgttttg |
| | catctggtgt gcaatgtgaa |
| 1801 | gagtccttca aaaatgccag aaatcaacgc caaggtgtgt |
| | ctgcctcttc atgatggtaa |
| 1861 | caatttgtat cattcagact ttcaggggag taataaaaga |
| | agttggataa aacgtttatt |
| 1921 | gagagactgt atggtgttat taccaagtaa tattttgttt |
| | ctttcctagg aattagaaac |
| 1981 | tgtattatca acacaaagtg atgagttaat agtagcagat |
| | tgttccgtta gtgctgtagt |
| 2041 | agaaaggtgg agttacatat tgcactatct tatgggatat |
| | gatttgatct atggttactg |
| 2101 | tgtatctaga ttactgaact aacactaatc gggtttttat |
| | tgaatttagc acatagcaag |
| 2161 | tttcttcaaa ggagtcacta atttttataa agagtacaaa |
| | agtgaatata tttcctttgg |
| 2221 | aaattttcat tgtgattagt tggataggaa aagatcagag |
| | tttttatcaa gtgatcttta |
| 2281 | aagaattttt tttttttaaa aatggtctcg ctgtgtggcc |
| | caggcttttc tcaaactcct |
| 2341 | gagggcaagc gatcctccca cctcagcctc ctgagtagct |
| | gggactacag gcatgtgcca |
| 2401 | ctagacctgg ctctaaagac atatatgaca cacgaaacca |
| | tttatttttc atttcacaat |
| 2461 | gtttattcac atatatggta ttagtattct aatgtagtga |
| | tgcactctaa atttgcatta |
| 2521 | tatttcctag aacatctgaa cagagcatag gaaattccct |
| | attttgccat tatcagttct |
| 2581 | aacaaaaaac ttaaaagcac tttatcattt catttccctg |
| | cactgtaatt tttttaaatg |
| 2641 | atcaaaaacR gtatcatacc aaggcttact tatattggaa |
| | tactatttta gaaagttgtg |
| 2701 | ggctgggttg tatttataaa tcttgttggt cagatgtctg |
| | caatgagtaa atttagcacc |
| 2761 | attatcagga agctttctca ccaatgacaa cttcattgga |
| | agattttaat gaaagtgtag |
| 2821 | catactctag ggaaaaaata tgaatatttt agcatctatg |
| | tattgaaaat tatgttgaat |
| 2881 | aaatgtcaga ctatttttta cataacgttg cttctgttta |
| | attttgtcac gttcagaggt |
| 2941 | ggggggtagg agatgtaagc ccttgacagc aaaataattc |
| | cttttgcttg atttcagaca |
| 3001 | gttgcatcag ctcctttgtt ctgtgttcat gttacactta |
| | tttaggtggc tgaatccaca |
| 3061 | gaggagcctg ctggttctaa tcggggacag tatcctgagg |
| | attcctcaag tgatggttta |
| 3121 | aggcaaaggg aagttcttcg gaacctttct tcccctggat |
| | gggaaaacat ctcaaggtga |
| 3181 | gtgttataat aaagatcttg gcttatgcaa catgaatgtt |
| | cctcgtttgc atcaatttaa |
| 3241 | gaataaggta tgtttacacg tatataatca gaacttttaa |
| | acatacagaa ttttgcttta |
| 3301 | taaatagctt cgctttaaag atctcttata tatttaactt |
| | ttcttaatac acagcctttt |
| 3361 | agtacacaca aatttaaaaa gtaggtaatg catatattga |
| | aaaaaaaaag aaaatgtagg |
| 3421 | cgttttatcc ttccattgtg ctgaccgctt ggttgccgtc |
| | atgataggaa attagtgctg |
| 3481 | ctgcaggaga aaacagctgt cgtaagcatt gtgcagctgc |
| | tttgctgagt ggctttgtgc |
| 3541 | tttattgtaa caatgggtga caacaaggga gagactgttt |
| | aagaagtgtc cttccaaaga |
| 3601 | cttgggggta ctaggaaaat tggccaattt cttataacta |
| | ttaaagcttt tctttagagc |
| 3661 | aaaagtcaga actaaatgct ctgttatttg gatttttata |
| | gctcttggaa tacattgttt |
| 3721 | ttggggaaaa aftcattaac tgcaagttgc aattctgtaa |
| | ctctccaatt ctccgtcccc |
| 3781 | ctttttctag tactttttat acacaatatt ttataaagcc |
| | aggtgtttta ggaatgagtt |
| 3841 | tttcttcctt ttccccctta atggaacttt caaatataca |
| | caacagtggg gactggataa |
| 3901 | ttaatcccca caccatcacc caggcctaat aaataacaat |
| | cagagtttta ccatagctca |
| 3961 | tctattaccc tttccctttt ttttaaaaaa agagtattta |
| | aaagtaattc ccaggcatca |
| 4021 | tgttatttca tccctatatt cttcagtata taactatgaa |
| | aaccttttag ttatcttgta |
| 4081 | tatctagaat gccattatca gatctaacag aaatcttaaa |
| | agcactttat cattttattt |
| 4141 | ccatgcactg taattttctt aaatgatcaa aaacagcatc |
| | ataccaaagc ttacttgtat |
| 4201 | tggaatacta ttttagaaat actctgtgta tggaatttag |
| | ttaaaagatt gtcagcatat |
| 4261 | aaattggata attattggat agaaaattat tggttagaaa |
| | aacttaaaac tacttccctt |
| 4321 | attctgattc aactattctt aacttgagaa ttgaggctca |
| | tatttgactc tctgaatctc |
| 4381 | accatattta aacttgattt cctttaacaa atatttattg |
| | aacagccagt acatacaact |
| 4441 | ttgcttaagg atatgagttg acctgcagga atgaccacat |
| | aaccaatttc tgatctttgg |
| 4501 | gcaattctat tatggtttca attttgtgat gtgctactga |
| | agaaattgac tgtgtaagaa |
| 4561 | gcacaaagcc aaagatgact cgcatacacc tgccctgtga |
| | agttgagggc tgtgtggcct |
| 4621 | gattaaagaa gcatgcattt ggccgggcgc ggtggctcac |
| | acctgtaatc ccagcacttt |
| 4681 | gggaggccaa ggtgggcgga tcacgaggtc aggagattga |
| | gaccatcctg gctaacacgg |
| 4741 | tgaaaccccg tctgtactaa aagtacaaaa aattagccag |
| | gtgtggtggc gtgtgcccgt |
| 4801 | agtcccagct actggggagg ctgaggcagg agaatggtgt |
| | gaatccggga ggtggagctt |
| 4861 | gcagtgagcc gagattgcgc cattgcactc caggctgggc |
| | aacagagcga gactccatct |
| 4921 | caaaaaaaaa aaaaaagaag catgcatttg acatcagacc |
| | agctctgaaa tccagccctg |
| 4981 | ctacttacta gctcagtgac cttgtgcaaa gcccctgtct |
| | tccctgagct gtacttgggt |
| 5041 | tccccttgta aaatctcctt catgagattg ctgtggaccc |
| | agcagcctgt acaggacccc |
| 5101 | cggtggtcag taagcatgca caggtgatac cacatgcaca |
| | cttcactata gattcagatg |
| 5161 | gaggatggag gaagaagtgg atattgggag gatgggagag |
| | atttccttca ggaaagactg |
| 5221 | ggagaaatgt ggcttttgag ctgctctcta aaagatgaac |
| | agtgggttga gacctgcagt |
| 5281 | gagactcaac aagtcaaaac tgaggtggga tctacttaac |
| | ccaaaaaggt tgtttatata |
| 5341 | tctgtgcact cagcaagcag gtggcaaggg ctgttgtttt |
| | cctgtgggat gggactgtgg |
| 5401 | tagaagtgct gtgtcattta gtaccttctg tgcttgtggt |
| | acatgggtgc gtcatacagt |
| 5461 | catttaccat gtaactgccg taaattccat tcttcYgtct |
| | cttcgatttg aattcttgat |
| 5521 | tttaatttaa acttagtttt catttgttca tactcaaccc |
| | actcaaaatg agtgtttttt |
| 5581 | caaatctatg tataggcctg aagctgccca gcaggcattc |
| | caaggcctgg gtcctggttt |
| 5641 | ctccggttac acaccctatg ggtggcttca gctttcctgg |
| | ttccagcaga tatatgcacg |
| 5701 | acagtactac atgcaatagt gagtccttcc cgccatgctg |
| | ggtgtggcca gggctcccgg |
| 5761 | gaattgaagg gaattttatc cRtgttacct gtaaagttca |
| | gaatggaggg atgagtgtat |
| 5821 | tttcatcagt ctgcagagcc ctgctctgtt tggtctgtgg |
| | gtagagtgta aatgacagct |
| 5881 | gctacctgat ttgtgtattg acacaagRgt gcttttgtct |
| | gatacatagt ttagtgactt |
| 5941 | tatttagaac atgttacttt cttttcaatt tgtgctatct |
| | tcaaagtttt gtgaggattt |
| 6001 | taatttgcta ctgtgccata atcttacagt gggcttgatg |
| | tttaatttca ggtgaaattc |
| 6061 | accttgtggc ttttcttaga aaaggcattt atagatatag |
| | ttagtaagga agttcttcac |
| 6121 | taaattgaag aaaaatcaaa ggcatatcta cctacttgaa |
| | attcttaaca gtaaaagact |
| 6181 | gctgtgtaaa taagccacag acttcacggt gctttggtct |
| | caacagtatc tgcctctgtc |
| 6241 | gtttttattt tagtttagca gccactgctg catcaggggc |
| | ttttgttcca ccaccaagtg |
| 6301 | cacaagagat acctgtggtc tctgcacctg ctccagcccc |
| | tattcacaac cagtttccag |
| 6361 | ctgaaaacca gcctgccaat cagaatgctg ctcctcaagt |
| | ggttgttaat cctggagcca |
| 6421 | atcaaaattt gcggatgaat gcacaaggtg gccctattgt |
| | ggaagaagat gatgaaataa |
| 6481 | atcgagattg gttggattgg acctattcag cagctacatt |
| | ttctgttttt ctcagtatcc |
| 6541 | tctacttcta ctcctccctg agcagattcc tcatggtcat |
| | gggggccacc gttgttatgt |
| 6601 | acctgtaagc agatggtttc tctaatataa attacactac |
| | actgtgttca cactaagcag |
| 6661 | attttgctct ttttgtttct tgtttttttt gagatggagt |
| | ctcgctctgt cattcaggct |
| 6721 | ggagtacaat ggcacaatca ctgcaatctc cgcttcccag |
| | gttcaagcga ttctcctgcc |
| 6781 | tcagcctcct gggtagttgg gattacaggc gcccaccacc |
| | atgcctggct aatttttata |
| 6841 | tttctagtag agacggggtt tggtcatgtt ggccaggtgg |
| | tctcgaactc ctgacctcaa |
| 6901 | gtgatctgcc caccttggcc tcccaaagtg ctggtattac |
| | aggcgtgagc caccactgcg |
| 6961 | cctggccaga ttttgctctt ttttgagcag tctcagttac |
| | tgtagaagga gatgtgttta |
| 7021 | aatagtatat cactctgtgg ctgggcgcag tggctcacac |
| | ctgtaatccc agcagtttgg |
| 7081 | gaggccgagg caggaggatc acatgaggcc aggagtttga |
| | gaccatcctg gccaatatgg |
| 7141 | tgaaaccccg tctctactaa aaatacaaaa aattagccgg |
| | gtgtggtggc acgggcctgt |
| 7201 | aatttacttg ggtggctaag gcaggagaat tgcttgaact |
| | ggggaggcag aggttgcagt |
| 7261 | gagccaagat cgcaccactg cactccagcc tgggtgacag |
| | agcaagaccc tgtcttagaa |
| 7321 | taaatacata ataaatagta tgtattctgg cactttcgat |
| | acaaggaatt catggcttgg |
| 7381 | ttgtatggtc ccaagaacat atcaatcctg tgttaatata |
| | agaatattat cttgtcctct |
| 7441 | agataagcta ccttaccttc caggctcaca aaccacaagt |
| | atgtagccat actgaggcat |
| 7501 | ggaacagaaa actgtatttg ttttgaatga gaacacattt |
| | gcctttatca gRccacagct |
| 7561 | gccttccagg gtaaagtcag gcactgactg ttagcatggc |
| | cctgaaaggc aagggaacct |
| 7621 | tcacatacct gacatttggt tttagctgtg gcccgaagca |
| | gtagttctca actgggggtg |
| 7681 | gttttgtacc ctctctcccc aggggacatt tggcaatgtg |
| | tagatatttt tggttgtcac |
| 7741 | atctagggga agtggtcctg ctggcgtcta gttagtagaa |
| | gcaagagtgc tgctgaattt |
| 7801 | tctacaatgc acaggacaac tcccacagta aatatttggc |
| | tcaatatgtc actagtgcca |
| 7861 | aagctgagaa agcctggcct agagtgatgg gtcttcgtgg |
| | ttgaaactaa aagaagaaat |
| 7921 | tttcctgtat agtaaaaatg gatttttatt ttagctttta |
| | aaaataaaaa aggaataatt |
| 7981 | agaatataat gaacactcaa atatccacaa ttagtcattg |
| | ttaatatttt attatattta |
| 8041 | agacttggga tttaattggt ttcttcaaat aaaacgttta |
| | gttaatattt tctgtagtct |
| 8101 | ctagaatcat atatttaaaa gaccaaatgt aggttgtcat |
| | tatgttatat ataattatag |
| 8161 | ctttgtaggt atatgcattc tccccgctct gttcaggttt |
| | tcaagggtaa ggtttagttc |
| 8221 | gtcataagca tttattgagt gcatactatg tgccaggtgc |
| | tgtttatatg gctgggtgtg |
| 8281 | caatgatgaa taaaacacag tccctgcctt caaggacctt |
| | acagactggt gagaatgtct |
| 8341 | gggagacagt gtgatcaaat gcctctgtag atgggtcttg |
| | cagtgagctt atcagggtgc |
| 8401 | tgctgtgatt agaggtgggg agccttggat tcttgagtaa |
| | gtctcactgt gacatcagct |
| 8461 | aagatggact tttatgtgct tcctttgaag gcatcacgtt |
| | gggtggtttc catttagacc |
| 8521 | gaggccggtt cagaacttcc caaatgatgg tcctcctcct |
| | gacgttgtaa atcaggaccc |
| 8581 | caacaataac ttacaggtat ggagcctccc acgaagccca |
| | ggcgagcttg acgtgatatg |
| 8641 | ccaggctctc caatcctcaa cctttagatt gccagcttgc |
| | ggtttaccat tttattgggc |
| 8701 | taaatatttc atgatttgtt cacatttctt cttagagcag |
| | cagctatttt taaaacgtcg |
| 8761 | aatgtgccat cacattctat cacatatttt tgacgtggca |
| | atttgcattt tggcttaagt |
| 8821 | aaataacatt tttttaaacc cactattttg agcgttcagt |
| | ggtctgtaac agtgtgttat |
| 8881 | accataagaa ctggtatgaa gtggttaact actagtttaa |
| | taatagttga agcctgggcg |
| 8941 | tggtggctca cgcctgtaat cccagcgctt tgggaggctg |
| | aggcaggtag atcacctgag |
| 9001 | gtcaggagtt taagaccagc ctggccaaca tggtgacacc |
| | ccgtctctac taaaattaca |
| 9061 | aaaattagtt gggcgtgcct gtattctcag ctgctaggga |
| | ggctgaggcg gaaggatggc |
| 9121 | ttgaccttgg gaggtggagg ttgcagtaag ccaagatcac |
| | accactgcac tccagcctgg |
| 9181 | gtgacagagc Ragactctgt ctcaaaaata ataataatag |
| | ttgcagatct agttgtttca |
| 9241 | tttgatattt gctgccagga gcagtcaaaa ctatgacaac |
| | atcaacacag ttgtgctgtg |
| 9301 | gaagcctgag aaacagccct atccagccta gggcatcatt |
| | ccctggggtc ctggctgcct |
| 9361 | gctgctgtgc ctatggggca gggggcaggg atttaccctg |
| | ccctttccta acattatttg |
| 9421 | gtgttcatca tagccctaat tgttttctca ttgtttcatt |
| | acctcattgt ttcattacct |
| 9481 | gtaggaaggc actgatcctg aaactgaaga ccccaaccac |
| | ctccctccag acagggatgt |
| 9541 | actagatggc gagcagacca gcccctcctt tatgagcaca |
| | gcatggcttg tcttcaagac |
| 9601 | tttctttgcc tctcttcttc cagaaggccc cccagccatc |
| | gcaaactgat ggtgtttgtg |
| 9661 | ctgtagctgt tggaggcttt gacaggaatg gactggatca |
| | cctgactcca gctagattgc |
| 9721 | ctctcctgga catggcaatg atgagttttt aaaaaacagt |
| | gtggatgatg atatgctttt |
| 9781 | gtgagcaagc aaaagcagaa acgtgaagcc gtgatacaaa |
| | ttggtgaaca aaaaatgccc |
| 9841 | aaggcttctc atgtctttat tctgaagagc tttaatatat |
| | actctatgta gtttaataag |
| 9901 | cactgtacgt agaaggcctt aggtgttgca tgtctatgct |
| | tgaggaactt ttccaaatgt |
| 9961 | gtgtgtctgc atgtgtgttt gtacatagaa gtcatagatg |
| | cagaagtggt tctgctggta |
| 10021 | cgatttgatt cctgttggaa tgtttaaatt acactaagtg |
| | tactacttta tataatcaat |
| 10081 | gaaattgcta gacatgtttt agcaggactt ttctaggaaa |
| | gacttaYgta taattgcttt |
| 10141 | ttaaaatgca gtgctttact ttaaactaag gggaactttg |
| | cggaggtgaa aacctttgct |
| 10201 | gggttttctg ttcaataaag ttttactatg aatgaccctg |
| | gcagagactc ctgtcatcct |
| 10261 | agcagtttac tctgcgtttg ttgtatctag acagtcaaca |
| | actgagttgt cggtgtttaa |
| 10321 | cctgaatgct tgtttttcag aagaRgactg tttgtgccgg |
| | taagaatgat caggtaaggc |
| 10381 | catgaaagtt tttgttggyg tttttgtttt tgagatgggg |
| | tcttgctttg ttccttgggc |
| 10441 | cagagtacat tggctactca caagtgggct ggtagctggc |
| | tacagcccca gactcctggc |
| 10501 | ttaagccacc tcctgcctca gccaccctgg cagctgggac |
| | tacaggcatg cgccatcaca |
| 10561 | cttagcttga aagttttaat ttactaagaa tatacctgtg |
| | tttcccccca tttcctgatt |
| 10621 | taaacagtac tggcttatat aggaacccat caaagttaaa |
| | ttccccaaat ttaaatttag |
| 10681 | taaatttagt ggtttcacct tggcaaatct gcaatagttt |
| | caccagctca aatttcatgc |
| 10741 | ttttgtaagc tgagcttatg tttgtgattt taatccttta |
| | agtactactg tggtaactaa |
| 10801 | tcattttttt gttttttttg gtggtgtttt tgtttttgtt |
| | ttgagatgga gtctcactct |
| 10861 | gttgcccagg ctggagtgcc gtggcgcgat ctcggctcac |
| | tgcaacctct acctcctgag |
| 10921 | ttcaagcgat tctcctgcct cagcctcccg aatagctggg |
| | attacaggtg cccaccacaa |
| 10981 | tgtctggcta attttttgta tttttagtag agacgaggtt |
| | tcacccatgt tggccaggct |
| 11041 | ggtctcaaac ccctgacctc aggtgatctg cccgcctcgg |
| | cctcccaaag tgctgggatt |
| 11101 | acagatgtga gccaccgcac ccagccaggg actaatcttt |
| | aaagcaaagt tttatatatt |
| 11161 | tttacgtgag taatgttatg tgtaggtgtt ctatttggca |
| | aaataaatca gccttttcta |
| 11221 | tcatgattgt ggtcatttaa attaatcctc atcggaaaca |
| | ttgtttacct aagataaaca |
| 11281 | ttcactaaac aactcatagc aagacgctgg gtaggtacaa |
| | agatgtctta tgtgtggtta |
| 11341 | tgctttcaaa gccaactgaa acccttttgt aaggagttaa |
| | atagcaaaaa gtttcaaata |
| 11401 | actgtgtgcc tctagaacag aactatcaga aggcaatgaa |
| | tattcacaaa ttgtgaagag |
| 11461 | atagtttgct tcaaggaaga aatgacttgt aactagagta |
| | ggtatgaaat gatgggggaa |
| 11521 | aaatgatgag gtatgaaatg actcaccttc tctccagctc |
| | aaggtaagaa gggtggcagc |
| 11581 | aggagtaaaa gctcagccac aggacgtgct cttcctgcca |
| | aacagctgga ttctgcacat |
| 11641 | gcttgggaat gaggtcctgc tggtttagga aaacaaacat |
| | taagaattcc caaagtcttg |
| 11701 | ggtggaaaag cctgttgctt ttcagaggca aggccatcac |
| | catttggcaa ggggcccaag |
| 11761 | gccccaggca gctgtggtac catctgtttc tgaaggagtg |
| | gggattttac cccctgaaat |
| 11821 | gtcagtttgt ggcttaaact ctgggttcta caggcccaaa |
| | ataaatagtg ccaggaaggt |
| 11881 | gcccctgaac agagctaacc agggttcaga ttggcacccc |
| | atccccactg gggcaagcag |
| 11941 | gactcttagc aattaaggcc taagacggct gacaggtggg |
| | acatggcaga aattcagtgc |
| 12001 | ttccaccaca gctactcaat gtgccacRat catgggccac |
| | acaccactct gaatacttag |
| 12061 | aaaattattg gtttgggcct ttattattaa gtagcaagta |
| | aataactgaa aaagccccag |
| 12121 | atttcagctc tggctatagc agctttctaa gtctgtgttt |
| | ttaaggtgca atttcttgaa |
| 12181 | tcctagttct gtagaagaaa cactctaccc ccccgccccc |
| | cccacccccc ccccccaccc |
| 12241 | ctaaaaaatg agcttcatga tcaagtacat tttggaaccc |
| | tcaggctgat ccaagttcat |
| 12301 | agatttcttc actgcaggcc ttctgggtcc tttaatatgc |
| | ctgaagctgg ggctttccct |
| 12361 | tcctgagaat ggcccaggac tatccatgtg cctcattttg |
| | ggaaatttag taatgagtta |
| 12421 | ctaaatcaac accacctttg gcattctaca tagcaaacat |
| | actttgttag atgtgacatt |
| 12481 | ttacacacta accaatggag ataaaatttt ttaaatttat |
| | ttttggccag gcacggtggc |
| 12541 | tcatgcctgt aataccagca ctttgggagg ccgaggcagg |
| | cggatcactt gaggtcaaga |
| 12601 | gtttgagacc agcctggcca acgtggcgaa atcctttctc |
| | tactaaaaat acaaaaatta |
| 12661 | gctgggcgtc gtcgtgggca cctgtaatcc cagctactcg |
| | ggaggctgag ggaggagaat |
| 12721 | tgcttgaacc cgggaggggg aggttgcagt gagccaagac |
| | cacaccactg cactccagcc |
| 12781 | tgggcgtcag agtgagattc tgtctcaaaa aataaataaa |
| | tgatttctta tttatttttt |
| 12841 | tttaccagtg ctctacatgt tcagagaaac ttctctggta |
| | accaaccaca gaaatgatcc |
| 12901 | ctgaaagtat agtcttagga gataaatatt ctttacatag |
| | ccaggaggga gatgagaagc |
| 12961 | catacctgtc tacagtctga ctgacaaagg aggaggctcc |
| | aggtcccctg gagaatccca |
| 13021 | ggttttatgt aataattact tggtcctttt caaagtactt |
| | ggatgagtgt aggatagtct |
| 13081 | ctttgtctta tcagctagtc ctgcaatcta ggtgttctcc |
| | cattttgtag aggcttgcag |
| 13141 | agatgagaga cctgtccaag gtctcaaacc cctaactggc |
| | agttctgaga ctagaaatac |
| 13201 | tccctctcag gagtggacct cctctacaat tttttttagc |
| | agtcctcatg tgccaaatat |
| 13261 | ggcgtggggg ccaggagaca gaatgaggca taggttgggc |
| | gtggcccctc ccctcttggg |
| 13321 | tcttgtagtc ggctgtgggt ggcaagtaca gcagYgatgg |
| | cagacaggtg tgatgagttc |
| 13381 | aaggacaggg aaataacatc cacagcccca tcccagtact |
| | cctgtgcagc aatggaagtg |
| 13441 | tgccaccgac acaggggcta cagggtgagc aggagtgaca |
| | ggcgaagaga ggaagagagc |
| 13501 | tctgcctgtg caaaggcgga gggaacatgg tgtgggagga |
| | actgaagaga attccacata |
| 13561 | agtatgaaga gggtagggag attgagactg gagaaaaggg |
| | gaagccgggg ctcccctttt |
| 13621 | gaccatgcaa cgcactggaa gcacagcact cccagcctca |
| | gggtcctcca tgattggaga |
| 13681 | ctgacaRtga attcagagga gcttgtggaa gtcacccagt |
| | caggtccaga aatcctgcag |
| 13741 | tgcatccctt ccgttacccc tgtcataact gggagaagac |
| | accacccaca tgacgcaggg |
| 13801 | gagagtgcay gcatgagcta gcacccatat tgtcccctgc |
| | atctgtcctt ggctatgttt |
| 13861 | tacacccccc accccttaga acattgtagt caaactagga |
| | tgtattaaat tggctggttg |
| 13921 | ctcccaacta cactggacaa agtggagaaa aaaaaaaaag |
| | gaggagctca aggtttcaaa |
| 13981 | ttcccagctc aagctctgca taaaaactgc tgtgacttcc |
| | ttagaagaga cccctatctc |
| 14041 | ctgtagctgc agggttgaga tttctgagct caagtgatct |
| | gcctgcctca ccctcccaaa |
| 14101 | gtgctgggat tacagttgtg agccaccctg cctggccagg |
| | gctgagattt gtgaaaagga |
| 14161 | aacccaaagt ctcatcttgc atgtggctga attatgtcgc |
| | aaatccaatt cccaaattcc |
| 14221 | agccttgcag ggtgtcttca gttaaagtga ggacaacttg |
| | aaaatcggaa tgggaacata |
| 14281 | agggaagatt ccagtaaagc tggggacatt gaatccctaa |
| | attctgtYat gttccctgcc |
| 14341 | agtagaaaca gcccatctac ccctccctgg gtccagctgt |
| | gtggacacag attggcagcg |
| 14401 | agtgtgcagg tgttatttcc ctacccttgt aatcatcaca |
| | ctttcttttt ctttttcttt |
| 14461 | cttatttttt tgagtcagag tcttgtgctg ctgcccaggc |
| | tggagtacag tggtgcaatc |
| 14521 | tcagctcact gcaacctccg cctcctgggt tcaagcaatt |
| | ctcctgcctc agcctcccga |
| 14581 | gtagctggga ctacaggcgc gcaccaccac acccagctaa |
| | tttttttgta tttttagtag |
| 14641 | agacagggtt tcacccccaa tagccaggtt ggtctcgaac |
| | tcctgacctc aagagattca |
| 14701 | cccacctcgg cctcccaaag tgctgggatt acaggcgtaa |
| | gccacYgtgc ctgacctcat |
| 14761 | cacaatttct tagccctttg agaaaccctg tggccttccc |
| | tgaggtagct gtcttgcggg |
| 14821 | gcacttctga ttcttcttgg atcctatgcc cttcccctct |
| | ttgctggacc tgtaactaga |
| 14881 | ctcaagtccc accaggcccc agagagaaag gtacacactg |
| | tgacccatga agaggtgtgt |
| 14941 | tacacaccaa aagaactgca tgatttttcc aatttataca |
| | gacaaatcca agagaYatgt |
| 15001 | atgggagtag attttaaggt tgtgagatca cggaaggacc |
| | atagtgttgg atctggctga |
| 15061 | acgtaatgat atgggcccac taagcagaga ttcttaactc |
| | agtgctttag catgaggggt |
| 15121 | tagaaagggc tctaacttgg ttggttggtt gtttggttcg |
| | ttggttggtt ggctggctga |
| 15181 | aacatggacc aaaaggtagg tggccgacac cgttccttat |
| | tttgttatta atatatttgt |
| 15241 | atattcatat acaaacttgt atgctatgat atctaataca |
| | tattacagat ataaaacaaa |
| 15301 | tctttaggcc aggcatggtg gctcactcct gtaatcccag |
| | cacttcggga ggctgaagca |
| 15361 | ggtggatcac gaggtcagga gttcaagacc agcctggcca |
| | acagagtgaa atcccatatc |
| 15421 | tactaaaaat acaaaaatta gccggtcacg gtgtcaggca |
| | cctgtaatcc cagctactca |
| 15481 | agaggctgag gcaggagaat tgcttgaacc cggaaggtgg |
| | aggttgcagt gagctgagac |
| 15541 | cccatcactg cactccagcc tgggtgacag agcaagactc |
| | cgtctcaaaa aaaaaaaaaa |
| 15601 | tcttttgttt ctttcctctc tcattccttt atcacctaac |
| | ataagatgga tcatcacagc |
| 15661 | attgaagtga caggatgtca agcagaagag taaacatcac |
| | ccaaggacgt tgcagcctct |
| 15721 | ctggggaaag gattggcatg ttttctgttg tatgcaggat |
| | ggttgagtca tgttaggtgg |
| 15781 | aagtatggct ttgttactgt ctttatctgg agattaagtg |
| | tggtttaagg agatgcatac |
| 15841 | aggtgccagg ttgacaaaga gagtactgta atgattagtt |
| | ttatgtgtga acttggctag |
| 15901 | gcccagttat gtaaacacga atctaggccg ggctttggtg |
| | gctcacgcct gtaatcccag |
| 15961 | caatttggga ggctgaggca ggcggatcac ctgaggtcag |
| | gagtttgaga ccagcctggc |
| 16021 | aaacatggtg aaaccccatc tctaccaaaa atacaaaaat |
| | tagcctggcg tggtggtgtg |
| 16081 | tgcctgtagt ctcagctact cgggaggctg aggcaggaga |
| | atcgcttgaa cctgggaggt |
| 16141 | ggatgctgca gtgagtggag atcatgccac tgcactccag |
| | cctgggcaac agagtgagac |
| 16201 | tgtatcgcaa aaaaacataa aagaaaaaac aacaaaaacc |
| | ccgtgaatct aggtgttact |
| 16261 | atgaaggtat tttgcagatg tgattaacct gcatgggcct |
| | catctaatta tctgaaagac |
| 16321 | cttaattgca aaactcaggg ttccccaagg acagagcaat |
| | taagtctatg gcctgcagcc |
| 16381 | tcagcttccg cctgagtttc cagcccacca tcctacccta |
| | cagcttcaga cgcgtctagc |
| 16441 | cagcccctac aactgtgtag gacaatttct agaagttagt |
| | taatgaatac gctattggat |
| 16501 | ctgtttctct ggaggaaccc tgactgacac aggggccggc |
| | tctggaggtt gtggggtcca |
| 16561 | gttccttatc cctgtgtagt gtattggcca gttggggtgg |
| | gaattgcttc caggcaggct |
| 16621 | gtgtcatttg ttcaggcagg gtcccctccc cttggctctg |
| | cctgagagca aaggcaggtg |
| 16681 | ggggtggccc tggggagggc ctgaagcttt gctctgtgcc |
| | tcctaaagct ttcccactcc |
| 16741 | agggaccagg ccaggcaggc tggcaggaag aggcaggctt |
| | catctggaag gatgtctcca |
| 16801 | gggtggaaat gatgagattt aaatggtgta gggacccgga |
| | gggtggggtg ggacagcacc |
| 16861 | actgacccag ctgcagagtt ggaccctctg aagcccattg |
| | tgtacatgag aatctgtgtg |
| 16921 | cctgattgcg taggtgccta tacatggata ggctgcgaat |
| | ctgtgtgcac acagctggct |
| 16981 | ggagagcaca tgagtaggta tatgtaccac attgtcagca |
| | ctcacccatt agctcctggg |
| 17041 | gactcacttg ctgcaggtga tccctgtcct cgtgggctct |
| | acaccctggc aggtcaacac |
| 17101 | agactacaaa gaaacaagcg gacataaaat gacaagggct |
| | aggacaaaaa gcatggaaag |
| 17161 | gagaggggat aacgtggcag gggacatttt agaatgcagt |
| | ggtttcgaca ccaggaggag |
| 17221 | gagtggttag acagtggtcg gggagggcct ctgaagaggt |
| | gacacctgaa tgatgagatg |
| 17281 | gagcaaacca agcaaagatt ggaggaagag cctccaagca |
| | gaaagaactg caaggacaaa |
| 17341 | ggccctgggg caggagcggg tacgtgtgtc ctgtatgtgt |
| | gtgtcctgca cggtggcagg |
| 17401 | tgtctgaagc tgagcccaga ggagctgtgg agatcaggcc |
| | cagaagtgga gccacagcac |
| 17461 | gtagggccag agacctgcag taagaaatgg gatgtggtcg |
| | agatgggatg ggagccaccg |
| 17521 | cagcaccatg gggcgggagc agcagagtct gatgttgtgt |
| | acttcaggga gctggagttc |
| 17581 | tatgaaggaa gagcgaggag gcatgtggga ggaagaacag |
| | ccccactgag gcctgcaggg |
| 17641 | aaggcagcag accccaggtc agagcatgaa ggtagagggg |
| | aggttccaag aagtgggttg |
| 17701 | gggaataagc actggatggc tgatgacaga gggcagggtg |
| | gaggatgcgg ggccagggag |
| 17761 | ggctgcacag agtcctggga gggtgagcgg tggccctggc |
| | tggctaggag gcgccacctt |
| 17821 | gaggtgctac tggaggatac gccgcaggga aggtggatgg |
| | tctcttctga tgacaacctt |
| 17881 | cttgctggca ttagactgaa aggggaggtg atttgtaggg |
| | atgaggccag aggggttgtc |
| 17941 | cccagggaag ggcaccagat gtggggcagg agagctggtg |
| | tgagttgcag ccgtggggcc |
| 18001 | tagaggaagt cacagcaccc cactgaattc tcacttcctc |
| | atcataacag accctgtgac |
| 18061 | atataaaacc tgctctgccc accgcacagg gatcacaagg |
| | ctggagtgaa ataatggagc |
| 18121 | acttccccag agtggcacac gggacccagg gacgggtgtg |
| | caaaaccgtt ctaggtggaa |
| 18181 | gaacactttt tttttctttt tctttttctt tcttttcctt |
| | tttttttttt ttttttttga |
| 18241 | gatggagtct ccgtctgttg cccaggctgg agtgcagtgg |
| | tgcaatcttg gcccactgta |
| 18301 | gtccctggct cccaggttca agtaattctc ctgcctcagc |
| | cttctgagta gctgggacta |
| 18361 | caggcaccca ccacaacatc tagctaattt ttgtattttt |
| | agtagagaca gggttttacc |
| 18421 | atgttgacca gactggtctt gaactcctga cgtcaaggga |
| | tccatctgcc ttggcctacc |
| 18481 | aaagtagctg ggattacaag catgagccac cgtgcaaagc |
| | caaaaacact tgattataat |
| 18541 | agcatgctat ttttcaatgt attagataaa tgtattttcc |
| | atttaaagtg gggatataaa |
| 18601 | gctccccttt aaaatccaca taagtaaaaa agtcagtctg |
| | tttaaaaggt taagtaaata |
| 18661 | acagtctagg gcagatgcac aaaagacagc atcatgaccg |
| | tggttcctga aggattaagg |
| 18721 | ttgcaggaaa cactgaatgc taaaagcttt gtgaatgtat |
| | agtccatgaa aatgtctttt |
| 18781 | aaaaaatgag gtgcatacca agatgtttga gtgtgtgtat |
| | ttggggtagg tgctgtgggc |
| 18841 | atacgggtgt acctgtgtgt gtctcacaag caggtgtagc |
| | tgggtgcttg tgtgtatgtg |
| 18901 | gtgtgtgtgt atctgtgcac acgtgcatat ctgtgcccac |
| | atatccatgc acacgtcctc |
| 18961 | ataaggctct ctgcggccag gtgcggtggc tcacgcctgt |
| | aatcccaaca ctttgggagg |
| 19021 | ccgaggcggg gggatcacga agtctgaagt tcgagaccag |
| | cctggccaag atggtgaaac |
| 19081 | cccatctcta ctgaaaatac aaaaaattaa gacagtgagt |
| | gttgatcgtg aagaagggaa |
| 19141 | gatgaatgtg gggattaggt gggaggaatg gggtgctgtc |
| | aagatgaaaa taaacttagg |
| 19201 | gtggagaggc tggggcaaaa gagaggccca acagtatgat |
| | ttgccccagt gcggggactt |
| 19261 | tgtgcctggt gatttgaggt ggcagggctt ctacccaggc |
| | ctgatgggag ctgggattaa |
| 19321 | aagcagctgt gacctaaggc aggccattgc tctgtggcct |
| | Rctcccctaa ctcttttgca |
| 19381 | gaaagtccca ggctaagaga tgggggatgg ttgtaatgac |
| | ccctcccaga aatcctggct |
| 19441 | ctgtcctgca gaggtggggc ccggggatca agacgcctct |
| | aggttcaaga gagaggcaga |
| 19501 | atgaggggtc agccagctgg ggcaggaagg cttcactcta |
| | ggctgcaagg agagaccttt |
| 19561 | cgccttgact ggaaggacgt gaggagcctg tggcctcctg |
| | tttgcaacca agggctgagg |
| 19621 | aaggggccgg gcattcctgc tgtaggtcaa tgacctggag |
| | aaacacatgc ttgaggacag |
| 19681 | agctcagatc attgtcccag cgcaaacctt ggtgggatgt |
| | aaggtttgga gcttcttaag |
| 19741 | ttccaagagg cagtctcatg cagttcaagg agggctggag |
| | aagcctggtc tgctcatggg |
| 19801 | agtcaattgt taaattttca ggaattttgt gagccaatta |
| | ttgaacacag ctattattaa |
| 19861 | aaacaaaatt ataggctggg cgtgatggct catgtctgta |
| | atcccagcac tttgggaggc |
| 19921 | caaggcggtg gatcacttga ggtcaggagt tcaagaccag |
| | cctagccaac atagcaaaat |
| 19981 | cctgtctcta ctaaaaatac aaaaacatta gtcgggtgtg |
| | gtggctcaca tctgtaactc |
| 20041 | cagctacttg tgaggctgag gcatgagaat tgcttgagcc |
| | caggaggcag aggttgcaat |
| 20101 | gggctgagac cacgccattg cactccagcc tgggcaacag |
| | agggagattg tgtctttcaa |
| 20161 | aataataaaa taaaataaaa taaaataata ggctgggtgc |
| | cgtgactcac gcttgtaatc |
| 20221 | tcagcacttt gggagaccaa ggctggaaga tcgcttgagc |
| | ccagaagttg gagatcagcc |
| 20281 | tggggaacac agggagaccc tggtctgtac aaaaaataaa |
| | aacaaaatta gccaggcatg |
| 20341 | gtggcacatc cctgtggtcc cagttactta ggaggctgag |
| | gtgaacaaag ttaacactca |
| 20401 | aaactcatca cttgtgaatt actttgctac agtgcactat |
| | tattattatt tatttatttt |
| 20461 | tactgggcag cctcttgagc ctaagtaggc ccagagactg |
| | tccagcatac tattattgat |
| 20521 | gctttgtggt tattgatatt gattggatcc gtatagtgga |
| | aatggctata ctgtagaatt |
| 20581 | gtgtgctact gtgtatttct taccaattct gcattcagtg |
| | gcatcacatt catagcttga |
| 20641 | agttggccat ggtgggaggt aaatatgtgt ggtataaatt |
| | ggcaaagact acagattggg |
| 20701 | gttcctgtct ggccccccaa gagctggttg ttaaactttt |
| | accagcacac cactgagttg |
| 20761 | gagtctggaa agcaggcttc gtccaggttc tgccctgcta |
| | gctcaactgg ctctcaaagc |
| 20821 | tttgctccac caactggcct atggctgctt ccactcacca |
| | attctccctt ttgccctcta |
| 20881 | aggccacctc ttccaggaag tttcccctga tttctttgcc |
| | tggacttcta aaattctttc |
| 20941 | tttgccaggc gtggtggctc acacctgtaa tcccagcact |
| | ttgggaggac gaggtgggca |
| 21001 | gatcacttga ggtcaggaga tagagaccag cctggccaac |
| | acggcgaaac cccgtctcta |
| 21061 | ctaaaaatac aaagattagc tggacatggt gacgcgcacc |
| | tgtaatccca gctactcagg |
| 21121 | tggctgaggc aggagaatca cttgaacccg ggaggcagag |
| | gttgcagtga gccaagatca |
| 21181 | caccattgca ctccagcctg ggcaacagag ggagactcca |
| | tctcaaaata aataaataat |
| 21241 | taattctttc ttacctcttc cgttcatatt catacagaat |
| | aatctccaca tctcgaaatt |
| 21301 | cttaactgat tagctagttc ttgctattaa ttaaatacgt |
| | gatgcatatg gccaagcttg |
| 21361 | gatggatgga atccctgtat tggtaaggtg ggaatttttc |
| | ttttcttttt tttttttttg |
| 21421 | agaccaagtc tcactctgtc acccatgctg gagtgcaatg |
| | gtgtgatctt ggctcaccac |
| 21481 | aacctctgcc tcccaggttc aagccattct cctgcctcag |
| | ccttcctagt agctgggatt |
| 21541 | acaggcacac accaccaagc ccagctaatt tttgtatttt |
| | tagtagtgac agggttttgc |
| 21601 | catgttcgcc aggctggtct ggaactcctg gcctcaagtg |
| | atctgcccac ctcagcctcc |
| 21661 | caaagtgctg ggatcacagg tgtgagccac cacgcccacc |
| | tagggtggga attttccacc |
| 21721 | tgggttctgg gctcagctct gccacagatt cctctctctg |
| | ggcttatcct ctgaRggcga |
| 21781 | gattttggca tgactgagtg gatggaggaa gaacttgggg |
| | tcagcgggct gtcaccctgc |
| 21841 | tctgccgtgg aaccgactca acaacagggc cacaacaggc |
| | cttgttggac atggaagcaa |
| 21901 | atgagaaaat tagtaatact gattcagtgt ttacttaagg |
| | ttctgatact ttgtccatta |
| 21961 | tagacctttt gcattaattt tgatttttta ttatataaaa |
| | tatatatata acataaaatt |
| 22021 | gatcatttta gccattcgaa gtgtacagtt ttgtggcgtt |
| | taatacattc acattattat |
| 22081 | acaacccatc tccagaactc ttttcacctt gaaaaactga |
| | aactctattt ccattaaata |
| 22141 | tgaactcact ccccgttctc tcttcctcca gcctctggtg |
| | acctccattc tattattatt |
| 22201 | attattatta ttattattag agagagtgtc cctctgttgt |
| | ccatgctgga gtgcagtgat |
| 22261 | gcaatcacag ctcactgtag cctcaaactc ctgggctcaa |
| | gggatcttcc cacttcagcc |
| 22321 | tcctgagtag ctgagattat aggcatacgc caccacactc |
| | tgctaattca cttatttttt |
| 22381 | ggaaagatgg ggtcttgctg catggtccaa gccagactta |
| | cattcctggg ctcaagcgat |
| 22441 | cctcccacct caacctccca aaacattgag attacaggtc |
| | tgagccaccg caccctgccc |
| 22501 | attctacttc ctggctctta aatatgacta ctctagatac |
| | ctcatataag tggaatcata |
| 22561 | cagtatttgt ctttgtaact ggttcatttt acttggcata |
| | atgtcctgaa ggttcatcct |
| 22621 | catcgtagtg tgtgtcagaa tgcccttcct tttaaaggat |
| | gaataatatt cccttgtgtg |
| 22681 | gatatatcac atgttgttta tccactcatc attgatggat |
| | gcctgtgttg cttccacttt |
| 22741 | tggctgctat ggaaaatgct gctatgaata cgggtgtgca |
| | aatattcatt tgagtccata |
| 22801 | attttgattg ttttttcttt ttgagacaga gtctcacact |
| | gctgtccagg ctacagttca |
| 22861 | gtggcgcaat cttggctcat tgcaacctcc acttcccggg |
| | ttgaagtcat tctcctgcct |
| 22921 | tagcctcccg agtagctggg attacaggta tccgccatca |
| | cacctggcca atttttgtat |
| 22981 | ttttagtaga gacagggttt caccatgttg gagactggtc |
| | tcaaattcct ggcctcaaat |
| 23041 | gatccaccca cctcggtctc ccaaagtgct gggattacag |
| | tgagccacca tgccgagtcc |
| 23101 | ataattttga tttttaaatg gtggctacta agtttttctg |
| | gcacccctta aattttgtca |
| 23161 | ggcacttgcc ttaccctagt cctggcccca gtttgggttg |
| | tcacagcaag gtggaagtgt |
| 23221 | actgaaaagc tcgtgtttta tctttatacR tttacatggg |
| | gccccaaaaa gggggaaaac |
| 23281 | ccactttgat agggatatga cacagggacg caggagccaa |
| | ccgaaagagc ccccagtggc |
| 23341 | caaagatsga gcaacttgag caacaaaata aataaagtaa |
| | gcatcaaatt atagcccaaa |
| 23401 | gtataaaata agtgtctatg agtctatact cacatagatg |
| | atttaataca ttcatattaa |
| 23461 | taaatgggag agcactttga gaggccaagg tgggcagatc |
| | acttgagccc aggagtctga |
| 23521 | gaccagatta ggcactgtga tgaaaccctg tctctaccaa |
| | aaacacaaaa attagctggg |
| 23581 | catggtgggg catgcctata gttccagtta cttgggaggc |
| | tggggaggga ggattgcttg |
| 23641 | agcctgggag acggaggttg cagtgagctg tgatctcacc |
| | actgcactcc agcctgggca |
| 23701 | acagagtgag gccctgtctc aaaataaata aatatataaa |
| | taagataaat atataaataa |
| 23761 | aaataaaaat aaacgggaaa gaagagacaa atcttctgtg |
| | caggagaatY ccaaatgaat |
| 23821 | tctgtagatt ctccacccta caggagggca cacacaactc |
| | caggctgcct tagtgacctt |
| 23881 | cttccaaaga gtacagtacg ggaaggggga gcggggagaa |
| | ttaacttcac agtggagaaa |
| 23941 | tctgacaaat acgacctccg ccaagtgatc gaggtcacat |
| | cagctgtcat gaattatgtt |
| 24001 | gatagtgggc atcctggata tgatgggatg aaatggcact |
| | ttacctccac gacccttttc |
| 24061 | acaacagccc gtaatgccag tataaggaaa acatcagacc |
| | aggagtggtg gctcacgctt |
| 24121 | gtaatccgag cactttggga ggccaaggtg ggtggatcac |
| | aggtcaggag tttgagacca |
| 24181 | gcctggacaa catggtgaaa tcctgtctct actaaaaata |
| | cacaaactag ccaggcacgg |
| 24241 | tggcgggtgc ctgtaatccc agctacttgg gaggctgagg |
| | cagaagaacc gcttgaaccc |
| 24301 | gggaggcgga ggttgcagtg agctgagatc gcgccactgc |
| | actccagcca ggttgacaga |
| 24361 | gtgagactcc atctcaaaaa aaaaaaaaaa aaaagaaaag |
| | aaaagaaaaa gagaaaagaa |
| 24421 | aaacatcaga cagatcccaa cagaagggca tcctacagta |
| | tacRtgacca ctgctcctca |
| 24481 | aacctgtcaa gactatcaga aacaagagaa actgtcacag |
| | ctacaaggag atgtgacaat |
| 24541 | taattgtgat tttttttttt gagatgtggt ctcgctttgt |
| | cacccaggct gcagtacagt |
| 24601 | ggcacaatca cagctcactg cagcctcgaa ctctggggct |
| | caagtgatcc tcccatccat |
| 24661 | ctcagcctcc caagtagctg gggctatatg cgtgcaccac |
| | cacacccagc taatttttgt |
| 24721 | atttttttag agacggtatt tcgccatgtt gcccaggctg |
| | gtctcgaact cctggattca |
| 24781 | agcaatccac ctaacttggc ctcccaaagt gctgggatta |
| | caggcatgag ccaccatgcc |
| 24841 | ttgccaaatg tgatgtattc ttgatgggat cctggaagag |
| | gaaaaagata ttaggtaaaa |
| 24901 | actaaggaca tctgaataac catggatttc agtaatgtat |
| | ccacactgat tcattaattg |
| 24961 | taacaaatat accgtatgaa tgcaagatgt tcataatgag |
| | gccggggcgg tggctcatgc |
| 25021 | ctgtaattcc agcactttgg gaggctgagg cggaaggatc |
| | tcttgagctc aggagttcga |
| 25081 | gaccagcctg ggtaacacag tgagatcccc atctctacaa |
| | aaaatttttt gaaattagcc |
| 25141 | aggtgtggtg gtggcacatg cctgtagccc cagctactca |
| | gaagactgag acaggaggat |
| 25201 | tgcttgagcc gggaggttga ggctgcagta agccaggatc |
| | acgccactac actgcagtct |
| 25261 | gagcaacaga gcgacaccct gtctcaatga taataataac |
| | aataataata ataatggaaa |
| 25321 | ctcagtatgg gttgtatatg ggaaacttgc tcagtttctc |
| | tgaaaatcta aaattcttct |
| 25381 | gaaaatcaaa gtctgcttaa aaattcacat ggggtttgca |
| | ttctcctcca tgacaaggtt |
| 25441 | ttgcaggtta tgattacaga ggctggagag ggtgcaggtt |
| | atcccgcccc tccctgtccc |
| 25501 | agggattccc ttccccagga gctgtgtctc ccctgtgaga |
| | gagggtgagc ttccatgacc |
| 25561 | ccaagcctct tgccctctga ctccggtatt cttagaagct |
| | gggaccagca ctgagcccaa |
| 25621 | attcccgaag cgctcaaata ctggctttct gtccctatgt |
| | gacctggagc ttgtagttta |
| 25681 | acttctctct gcctcactgt ttgacctata aagcagggca |
| | atcaaggcat cccgggggtg |
| 25741 | gctatgaaga gtgaatgaga tagcagacaa cccagatgcc |
| | taccgacagg tgaagggacc |
| 25801 | aacacagtgc ggtataggcg tataagggaa tggagtatgg |
| | acacagccta caacacagac |
| 25861 | aaaccttgaa gacattcctc taagggacat aggccaggca |
| | tggtggctca cacctgtaat |
| 25921 | cctagcattc tgggaggccg aggcgggcag atcacttgag |
| | gtcaggagtt gagaccagcc |
| 25981 | tggccaacat ggcaaaatcc cgcctctact aaaaatacaa |
| | acattagctg ggtgtggtgg |
| 26041 | taggtacctg taatcctgga tactcgggag actgaggcaa |
| | gagagttgct ggaacccggg |
| 26101 | aggtggaggt tgcagtgagc cgagattgtg ccactgcact |
| | tcagcctggg cgacagagcg |
| 26161 | agactctgtc gaaagaaaga aagggaggaa ggaaggaaga |
| | aagaaaggga agggaaggga |
| 26221 | agggagggga ggggagggga ggggagggaa gggagagaga |
| | aagaagaaag agaaagaaag |
| 26281 | gaagaaagaa aaagaaggaa agaaagaaag aaagaaagaa |
| | agaaagaaag aaagaaagaa |
| 26341 | agaaagaaag aaagaaagaa agaaaagagt gaacccagga |
| | acgaaagatc acacacactg |
| 26401 | tatgactcta tttacatgaa atgttcagag taggcaaatc |
| | catagagaca gaaagcacat |
| 26461 | ttatggttgc caggagctgg gaaagggcag gatggggaat |
| | gactgtttat tggatgtggg |
| 26521 | gctctatttt ggggtgatga gaatgttctg gaattaaatt |
| | catggctgca taacactgtg |
| 26581 | aacatactaa atgcccctga attgtacact ttaaaatggt |
| | taaagtggca agttttcact |
| 26641 | aagcagtaaa ttaaattcta ctacaatttt aaaaagacta |
| | aaaaataatt taaaaaagat |
| 26701 | taaatgagat aacgcaaaaa agcattatct cgaaaataca |
| | gctgatatta gtataattct |
| 26761 | tactaagttt taagagtcta aggtgcagga ttctaagttt |
| | aaagggatag gctcttttgg |
| 26821 | ttttttggtt tagttatttg gttttttttt ttaatccatt |
| | atccccaccc ttgggaggcc |
| 26881 | cccagcaccc agtctgcact agaggatggg gcccacctcc |
| | cttttctctc caggcccagc |
| 26941 | cactgaccac cagtaccctg gccaggggca ccctcggtca |
| | ttgccctccg tggcccaagg |
| 27001 | aagggaacag aaacaacagc caagaagaca atagccgccg |
| | ggaagtcctc acatttctgg |
| 27061 | agaaatagag cccattaatg aatgaagttc ctccagcctg |
| | atcggaggac ggggtgctgg |
| 27121 | ggaggcctgg gctaaagggc tcacctccag cccccaccct |
| | ggcagggccg atggtacatg |
| 27181 | ctcactcagt gagggggctc cagaggtctg tgggtacgaa |
| | cccaagggct ggtgcccagg |
| 27241 | ggcaatcagc ttatgtctct gagccttggg aaacagtgag |
| | ggtcagcccg gctccccacg |
| 27301 | tgcttctggg cagctttggt attggagcag gtgcaaactc |
| | Rggactaggg caggaccccc |
| 27361 | tgagaggcga ctgagcaagg ccatcccgac tcatgtttcc |
| | ttggccctgc ccggggcaca |
| 27421 | gcatcctgcc cacatccctg cagccctggc tccttcctag |
| | gggctctgag gaggcagcac |
| 27481 | ttggtcatct ggtcacagtt gctgcagggc agttcttggc |
| | cccagctgta ggtaaagtac |
| 27541 | tgtatgttgt aattttttga aagataacac gttcacacaa |
| | ctcagaattg aaatgccaca |
| 27601 | gacattcccc ctgctccgcc cctttccccc ggatacccag |
| | tttctcccgg aggcagccaa |
| 27661 | tgatctcaga ggctgtatac ccccccagag ttattttatg |
| | catatcaagg aaagtctaca |
| 27721 | tagaggactg tttctggggt acccagatgc agcgtcaaat |
| | gccatggaat actacagtga |
| 27781 | ggacattatc ctttcaagct ttcaaatcag agcaagggaa |
| | aggtcgatgc tagagtttct |
| 27841 | ctagcaccca tgaagccctc tccctttttc tactgagttt |
| | tactttacag gcaacagcag |
| 27901 | gcttcaagct tggggtcatt gtcgggcaac agtatctggc |
| | aagaattcaa tgtctttttc |
| 27961 | tcatagtcat tgtattttgg cctctttcta tttatggcaa |
| | ctgagagaga aagcttattc |
| 28021 | ctagatatat gtatttaagt aaaaaataaa tgaattcatg |
| | gaaacatatt aagcaattat |
| 28081 | ccagataaca taagggatgg caaaaatggt gcagatggtg |
| | gaggggagac aagtagaagt |
| 28141 | tggggtgctc ttgttgaatg tctggctctg aactctagag |
| | gaggccgcag gggctgggca |
| 28201 | ggaaggaggt gaatctctgg ggccaggaag accctgctgc |
| | ccggaagagc ctcatgttcc |
| 28261 | gtgggggctg ggcggacata catatacggg ctccaggctg |
| | aacggctcgg gccacttaca |
| 28321 | caccactgcc tgataaccat gctggctgcc acagtcctga |
| | ccctggccct gctgggcaat |
| 28381 | gcccatgcct gctccaaagg cacctcgcac gaggcaggca |
| | tcgtgtgccg catcaccaag |
| 28441 | cctgccctcc tggtgtgtaa gtatcagtgc atctgtctgc |
| | cctgccaggg gtcttttcat |
| 28501 | ggacacccac tatgccagga gcctccctgg cctgaagcca |
| | gccctgaagc cggctgccac |
| 28561 | actagcccag agagaggagt gccctgggag ggagatgggc |
| | tgagYggagc tgtcatcacc |
| 28621 | ccctcctgac ctcgccttca aggtcaagtt ctttggtRag |
| | aaggtcctag ctgcattgca |
| 28681 | aacagccagg tatagggatt tgtgtttgtc tgagacccag |
| | aatcactggg gttcRagtta |
| 28741 | gggttcagat ctgagccagg ttagggggtt gagtcagggg |
| | gtaaagatta ggaggttggt |
| 28801 | gtatatttgg tgttgggggt cactctatgg ccaaagtcag |
| | gggttgccat gagctcaggt |
| 28861 | gacggaggct ccatcactga ctgttgtgtg actttggcca |
| | gctcccctgc cctctctggg |
| 28921 | cctcagtctc ttgctcaata taataagggt atagggaggc |
| | taaatgatac aatttctaaa |
| 28981 | atagagtatc gccaagttca aaagccagaa ttatagaccc |
| | ccaggactac agacagtgtc |
| 29041 | acagcatcgt ctgggtgagg ctagggttag tgtgcggctg |
| | ggctcagggc tgccccattt |
| 29101 | gctaggatcg tggggttccc atgtgtcagg atccagaggc |
| | tagggtatga tcaggatctc |
| 29161 | tagctggggt cagggtcaga gctctctgtg tcccctagaa |
| | ttgccatcaa ccttaaaccc |
| 29221 | agagggaggc ccagtccaac ccctcagctt taagacctgc |
| | tgggagcctc atctcagaga |
| 29281 | ggctgagtca tggccaaggc cagttggggg tgggagcagg |
| | gggcttggtg tgggcctgca |
| 29341 | gcccctcatc cactgccctc ccctctagtg aaccacgaga |
| | ctgccaaggt gatccagacc |
| 29401 | gccttccagc gagccagcta cccagatatc acgggcgaga |
| | aggccatgat gctccttggc |
| 29461 | caagtcaagt atgggttgca caagtgagtc gggcctcggg |
| | tgtgaccagg ctgggggtag |
| 29521 | ggaggcggga ggaacagcct ggggcttgcc cccagcccac |
| | agggaggaaa ggcagcagct |
| 29581 | gggggactca ggtctctccc cttgatttgg aaccagagcc |
| | tgacaccttc cctaccccca |
| 29641 | ccctccatac cctggtgccc tggggggatt tattggagtR |
| | tatcaacctc tccaacagcc |
| 29701 | cctctaagag tcaggcttca aagggtcctt tcccactgcc |
| | ctgggaagat ggaggtctta |
| 29761 | tttcggggtg aatggggggt agggtagaaa aatctcaaca |
| | aaataagtat tttttaaaaa |
| 29821 | aatgtataaa tgttgttttc ttatagtaca gacaggtctt |
| | gctatgttgg ccaggttggt |
| 29881 | cttgaactct tggcttagcc agtcccccac cccaagccta |
| | aaattagtat cttgacttta |
| 29941 | tttgggatga tggtaacagt caagggtcgg ttgtgggcca |
| | ggtgctttta caaacaaYat |
| 30001 | cctcaccttt agcatatatt tttttctttc ttgtttttca |
| | ttttttgaga cagagtctcc |
| 30061 | ctctgtcact taggctggag tgcagtggca caatctcagc |
| | tcgttgcaac ctccgtctct |
| 30121 | gggttcaagg aattttcgtg cctcagcctc cagagtagct |
| | ggaattacag gcacacgtca |
| 30181 | ccacatccgc gtaatttttg tatttttagt agagatgggg |
| | tttcatcatg ttggccagac |
| 30241 | tggtctccaa ctcctgacct caagtgatcc gcccacctca |
| | gtctcccgaa gtgctggggt |
| 30301 | tacaggcgtg agccaccacg cctggccctt tatctatctt |
| | aatctttatt ttatttattt |
| 30361 | atttatttat ttatttattt atttatttat ttatttattt |
| | attgagatgg agtctctcac |
| 30421 | tgtcacccag gctggagtgc agtggcacga tctcagctca |
| | ctgcaacctc cacctcccgg |
| 30481 | gttcaagacg ttctcctgcc tcagcctccc tagtagctgg |
| | gattacaggt gcccaccacc |
| 30541 | acgcccggct aatttttgta ttcttagtag agacggggtt |
| | tcaccatgtt gacctggttg |
| 30601 | gtcttaaact cctgacctca agtgatccac ccgcctcggc |
| | ctcccaaagt cctgggattg |
| 30661 | caggcgtgag ccacagcgtc cggcctatct taatctttat |
| | catatatttt agcctcttct |
| 30721 | gtaaaagagg ataatgccat cgcccggatg accctgctta |
| | acaaacacgg aaacaggagc |
| 30781 | cgatagaggt ttagcagcct ggcggagctc atgtgcaaac |
| | tcagctcagt atcggaaact |
| 30841 | cagccacctt catggcacct caggctgccc tggagcctgg |
| | gtcccggtct gtgtgtcggt |
| 30901 | ctgaggcccc aagggtgggg cagacattgt tcagggacct |
| | tgtctttgtc ttaaagccaa |
| 30961 | tctcctcctc ctccccggcc ctgctaaaca cgctccccag |
| | gggtggtctc tgctacccgc |
| 31021 | gcacattggg ccttgagtct tggtaaatgt ttctgagcca |
| | ccagggggcg ccagcggtgc |
| 31081 | tggatgccac ttcgcctttt gcaggaaaac tcccgccgct |
| | agcgggtgct gtggggcgtc |
| 31141 | ccaggtctcg cgcagccacg ccctctgtgt gaccttgggc |
| | ttcagtttag gcttctgtaa |
| 31201 | aagagaataa tgggcaaggt ccagtggctc atgcctgtga |
| | tcccagcact ttgggaggcc |
| 31261 | gaggtaggag gattacctca gccagggttc aagaccacct |
| | gtctctataa aaaatttaaa |
| 31321 | aattagctgg gcatggtggt gcgtgcctgc agtcccagct |
| | actcaggagg ccaggggagg |
| 31381 | tcaaggctgc ggtgagctat gattgcatca ctgcattcca |
| | gcctgggtga cagagcaaga |
| 31441 | ctctgttgct aaaaaataaa agaggataat gctatcctag |
| | acctatgtgt tgcaagaggt |
| 31501 | cagacatggc aaaagcgttg agaagttaaa gaaatagtat |
| | ccttaataaa tcagcaataa |
| 31561 | ttcagtaaga ccagactgcc atagactaga tgtcatagtc |
| | attaatatat aactgttatc |
| 31621 | ccaaacgtat atgagtgggg tagaaataaa atatgattgg |
| | ccataactat gattggtcat |
| 31681 | gattaatgtt agatgaagtt ggataatggg taagatgaga |
| | attcttcaca ctattctctc |
| 31741 | taaagcgaat ggaataaaat agaacagaac agaccgggaa |
| | agccagatat atgtggattc |
| 31801 | tccttgctgg gcacagtgtg tcatagtggc ttataatatg |
| | ggatttggag tgggatggac |
| 31861 | ccaggatcaa attcccttct actgaggttt tctgaagcca |
| | cataagctgt ctgagccatt |
| 31921 | tctgtctcag ttcagtgggt acagcaatag tgactacctc |
| | gtgggtagct gtgaggatta |
| 31981 | aaccaggaaa tgtgtataaa ctctaagcac agtgcctgcc |
| | acacagcatg tgtttggtac |
| 32041 | gtgatggccg cttctattgt gtcatattcc atgtgctcaa |
| | gccgggccct gggggagagt |
| 32101 | tcagcaaggg tagagggata tgagagtgaa tgtggcccac |
| | tggcctccct gcctgcagtc |
| 32161 | tctcctctct gatccttgct tcctaagggt cttcactgag |
| | ccccacctct gaccaagtcc |
| 32221 | ccggcggcac aggcagcaca gatcctctgc tgtacctaca |
| | ccaagacccc agggccaacg |
| 32281 | cttctcccat tgtgcagctc cacctctgcc cccggggcct |
| | agctgaggcc tcctccaagc |
| 32341 | tgagccacct actatcttcc aaactcccac cctccatctg |
| | gtgtcacctc ctcccagaag |
| 32401 | ccctctgtat cagtttcctg ttttctgcca taaaaaaaat |
| | cactccaagt ttagtggctt |
| 32461 | aacatgacac aagtttacca ttttacagtt taaaaggcta |
| | gaagtccacc atggccctcc |
| 32521 | Ytgagctaag atcaagctgt cagcagaacc agattccttc |
| | tgggggctat aggggagaat |
| 32581 | taattccctc gctttctgca gcttctagag gcttccccca |
| | ttccttggct tccctccatc |
| 32641 | tacttttatt tagggcgagg gaagcttcct gctctgactt |
| | tctcatttat ggtattctcc |
| 32701 | cctgctttcc agcagctgtg attgtcccaa gtcctgtcct |
| | ctggttctct aggccagaaa |
| 32761 | aactatgatc taccagagct caagaacttg aaagggcctt |
| | ttcccactgt cccttctcac |
| 32821 | agtgagagcc ggagcccagc ttcgtgctag aatctgtgaa |
| | aatggagaaa tgcaccctgt |
| 32881 | gctgttctct tcctccaccc ggcatctccc ctgcagcccg |
| | gctgggtttt tttgtttgtt |
| 32941 | tgtttgtggg tttttttgtt tttttgtttg tttttgagac |
| | agagttttgc acttgtcgcc |
| 33001 | caggctggag tgcaatggca cgatctcgac tcactgcaac |
| | ttctgcctcc tgggttcaag |
| 33061 | cgattctcct gcctcaacct cccgagcagc tggaaccaca |
| | agcatatgcc accactcccg |
| 33121 | gctaatcttt tttttttttt tttatgcatt tttagtagag |
| | atggggtttc accatgctgg |
| 33181 | ccaggctggt ctcgaactcc tgacctcaga tgatccacct |
| | gcctcggcct tccaaagtgc |
| 33241 | tgggattata ggcgtgagcc acggcctggc ccagtctgac |
| | tgttttcact tactctctaa |
| 33301 | tgtctcaggt agtgtttatt gtattctgtg cggaggtcaa |
| | gaatttagtc atccaaggag |
| 33361 | gttagtgtat taggagctta cgcagctatt accagaagag |
| | actccactca aaaatttggt |
| 33421 | acgtggctgg gcgcagtggc tcaaacctat aatcccagca |
| | ctttgggagg ccgaggcggg |
| 33481 | cagatcacct gaggtcagga gttcaagacc agcctggcca |
| | acatggtgaa accctatctc |
| 33541 | tattaaaagt acaaaattag ctgggcatga tggtgcatgc |
| | ccataatctc agctacttgg |
| 33601 | gaggccaagg caggagaatc actgaaccca ggaggtggag |
| | actgcagtga gctgagattg |
| 33661 | cccgctgcac tccagcctgg gcagcaagag caaaattctg |
| | tcacacaaac aaacaaacaa |
| 33721 | acaaaaaaaa cgggttgggc atggtggctc atgcctgtaa |
| | ccccaacact ttgggaggct |
| 33781 | gaggtggggg aatcacctga ggtcaggagt tcaagaccag |
| | cctggcaaca tggtgaaacc |
| 33841 | ccctctctac taaaagtaca aaaattagct ggatgtcgtg |
| | gcgggagcct gtaatttcag |
| 33901 | ctactaggga ggctgaggca ggagaatcac ttgaacccag |
| | gaggcagagg ttgcagtgag |
| 33961 | ccgagatcgt gccactgcac tccagcctga gcaacagagc |
| | cagactcagt ctcaaaaaaa |
| 34021 | aaaaaaaaaa caatggtatg agctttaaat ttctgtagaa |
| | ctgaaagagg attggagatt |
| 34081 | gtagtagggt ctaattctaa attagagcat ttagaataat |
| | gtggagtctg gtcaacatag |
| 34141 | tgagaccccc ccaatctgca caaaaaagac aaaaattagc |
| | caggcagtgt tggtgcatgc |
| 34201 | ctgtggtccc agctattcca gaggctgagg caggaagatc |
| | gttggaattc gaggctgcag |
| 34261 | tgaactgtga ttacacaact gcactctggc ctgggcaaca |
| | gagagccacc ctatctcaaa |
| 34321 | caagaaagaa caaactaaaa aaaaaaaaag aagaagaaga |
| | atttggagca atctagttgt |
| 34381 | ttcctatacc agaagtcttt gccaatctat ttttttttaa |
| | ttttattttt aatttttgtg |
| 34441 | agtacatagt aggagtatat atttatgggg tacatgagag |
| | tacatagtag gagtatatat |
| 34501 | ttatggggta catgagatgt tttgatatag acctgcaacg |
| | ttttgtcaat ctattttttt |
| 34561 | tttggcgaca gtcttgctct gttgcccagg ctggagtgta |
| | atggcgcgat ctcagctcac |
| 34621 | tgcaacttcc gcctcgtggg ctcaggctat tctcctgcct |
| | tagcctccaa actagctggg |
| 34681 | actacagacg cccaccatca tgcccggtta atttttttgt |
| | atttttgtgg agacgagatt |
| 34741 | tcaccatgtt ggccaggctg gtcatgaact cctgacctca |
| | ggtgatctgc cctcctcggc |
| 34801 | ctcccaaagt gctaggatta caggtgtgag ccaccacgct |
| | ggcccaccaa cctatttttg |
| 34861 | atctaacttt acctctggtg gtgtattgat actcttccga |
| | atcaattttc acccttcttc |
| 34921 | atataccatt tacatttcta agaatttgtc catttcattt |
| | catctagtta acctcatttg |
| 34981 | ttgacataca attgttcgta gtattctctc ataattcctt |
| | ttatttctgt aagactggta |
| 35041 | ataatggcct tgcttttatt tctgttttta gtaatttgag |
| | tcttcttctt tttttttttt |
| 35101 | tttgccagtc tagctaaagg tttgttgatt ttgttgatct |
| | tttggaaaaa ccagctattg |
| 35161 | ttttcaccga ttgttgtttt tgttctatta tttcattcat |
| | aggcactaag atcctgatta |
| 35221 | cttccttcct tctgctagct ttgggcttag tttgccctta |
| | tttttcaagt tccataaggt |
| 35281 | ggaaagtttg attattgagt tgagatcttt ctctttttta |
| | aagataggca tttctagata |
| 35341 | taaatctccc tgtgagcacg gttccctcca tcttcagcac |
| | accagggttg actctctccg |
| 35401 | ggcgttcttc cctggtcacc tctccccttc ctctcctctt |
| | ctgcctcctc ttccactttt |
| 35461 | cggtaccctg tgattgtatt gggaccaccc agataaccta |
| | ggatcatctc cccacctacc |
| 35521 | ccaaggtcct taacttaacc atactttcat atgggtaaca |
| | cgagttgagt gtggtaccca |
| 35581 | gggtttgaca tgttgggtaa catatttgca ggttctgtgg |
| | attaggagga cattttgggg |
| 35641 | gccatgattc tatcttccac cctcgcctag acaaaattgg |
| | aggctcactc cttgggctcc |
| 35701 | ctggatgacc cccaacatcc ttcctcactt ccattccttc |
| | ccagcatcca gatcagccac |
| 35761 | ttgtccatcg ccagcagcca ggtggagctg gtggaagcca |
| | agtccattga tgtctccatt |
| 35821 | cagaacgtgt ctgtggtctt caaggggacc ctgaagtatg |
| | gctacaccac tgcctggtgg |
| 35881 | taagcattcc tgtcagctga tgccccatgc cctggccctc |
| | tctgggctgg agggctgaat |
| 35941 | gagggtcctg ggtccttggc tctttccagg ctgggtattg |
| | atcagtccat tgacttcgag |
| 36001 | atcgactctg ccattgacct ccagatcaac acacagctga |
| | gtatgtgtca agcgtcctct |
| 36061 | ggggaagtgg gagctggact ccagggcttg gcctcagcag |
| | agggggaggt tgtgcaggca |
| 36121 | gagggttctg gggccaccaa aggaggccca gcctgggaag |
| | tttgcagggK tggggacccc |
| 36181 | agagctggcc aagctcttga ctggcctggg cagcatgtgg |
| | ataccatctg atagcggagg |
| 36241 | ctgccctgag gtcatgtcgg gtctccctgc agcctgtgac |
| | tctggtagag tgcggaccga |
| 36301 | tgcccctgac tgctacctgt ctttccataa gctgctcctg |
| | catctccaag gggagcgaga |
| 36361 | gtaagtacac caccctgtgg cccccattcc tgctcgtgcc |
| | catcctgtta gtgtgtccac |
| 36421 | ggctccYtcc aggctcaacc ccacacaggg catgcttgtg |
| | ggtggccaaa cctgagggca |
| 36481 | gcaatacctt cagtggggtc acttcctacc ccctcccatc |
| | aatacaccct caaaggctgg |
| 36541 | aaacaacaat aaccaacagc tagtaactaa cagctattaa |
| | gaacttgctg tgtgcaaagc |
| 36601 | actattccaa gcccttttca tgaattaatt gattttgtcc |
| | ttaaaaccaa ccctaggata |
| 36661 | tagattctgt tatcatcccc tttttacata tgggtaaact |
| | gagtcacaga gaggttagaa |
| 36721 | aggaaaagct catatctacg gagtgcatcc tgcattccaa |
| | gcaccacact aactcagaga |
| 36781 | taaaactcta gccaagctaa gtaacttgct gaggacacac |
| | aactcgccac taagggatgg |
| 36841 | gagtaggatt tgaacccagc attctctgac cccagaagct |
| | gagttcctag atactttact |
| 36901 | ctcctgcttc ccagggtggg gctttttgtc ttggccaaca |
| | ccctctgtca aggagctgtg |
| 36961 | ggtaacccca ttgcacagag gaagataaca aggtttggag |
| | agtccctagt catgttacca |
| 37021 | atgccaaacc tggaaggcag aagggaactg gtgggtgggg |
| | tctggagagg agccctctat |
| 37081 | tcaggccatt ttctgactct ggagcagacg gatacatgta |
| | tgaatttgga ctctagacac |
| 37141 | gttctcgtgt gtgtgacagg tgtgagcgtc acaggagctg |
| | ggccctcccg aggaattctg |
| 37201 | ggatggtgcc acagttaatt cttgggtctg aggctccgtg |
| | ttctcagctg caaaatggga |
| 37261 | gtgataattc ttacttcctg agctacaaga gtcagggcca |
| | acagagccat gaacggtgcc |
| 37321 | tggtacacac taggcRctcc atggatgcac aggactggtc |
| | aggggctcat tgtggtgctt |
| 37381 | gctgccttca ggcctgggtg gatcaagcag ctgttcacaa |
| | atttcatctc cttcaccctg |
| 37441 | aagctggtcc tgaagggaca ggtgagtgag gctggctgac |
| | tccctgtggt ccagggccat |
| 37501 | gcccaggagg ctggatccct ttcctccctg cctttccctg |
| | agaaggtgcc actcccacct |
| 37561 | tctccatgtg gccagtcccc tgtgccggtc cccagcactg |
| | ccaccaccac gcagctggaa |
| 37621 | ggaggcactg cctctggcct cctttcctgc ctggaaagca |
| | cctgctctgt ctgccccaga |
| 37681 | tctgcaaaga gatcaacgtc atctctaaca tcatggcYga |
| | ttttgtccag acaagggctg |
| 37741 | gtgagtgYgt ttctgtctgc atgcctcaga agacagcagt |
| | gggagccaga aagccacctg |
| 37801 | ctgcactatg tggccttggg actgtcactc ttcctgtcta |
| | ggtcccatgg gctctatctg |
| 37861 | gctctgacac ttgatgatta gttatgagca tactttggca |
| | aatctctgcc cctttgggct |
| 37921 | gcagcMtcac aagctgtgtg gcgttgggca agtctataga |
| | actcaggaca aatgggtgat |
| 37981 | taagtccaag aggactccaa gattctcctg gaagtagatt |
| | aggaaaaaag ataattagat |
| 38041 | tgctcacatg gctgggcact catccatgta ctgtactctc |
| | ctatgcagta cagagcagag |
| 38101 | ctgggtttca gcccaagtct tggactctgc tctgaaccaa |
| | ccttctagaa gggctctacc |
| 38161 | tacccagaca gacagacttg ggaaaagaga gaatgaaaaa |
| | gtgccacacc cctccccgca |
| 38221 | cacccaggtc ccactttaca gaggggaaca ctgaggctgg |
| | agggttgggt agctgtgtgg |
| 38281 | atgcagggga gcggtgactc agggcaattc ccccatcctg |
| | aggccctgcg ttgatctttt |
| 38341 | cctcctgcag ccagcatcct ttcagatgga gacattgggg |
| | tggacatttc cctgacaggt |
| 38401 | gatcccgtca tcacagcctc ctacctggag tcccatcaca |
| | aggtaggagt tgtgggaggg |
| 38461 | tggggcaggg cccagcttcc ccaggggagt tggtcctttt |
| | ttgtgctctg acaaccccgt |
| 38521 | cccccagctt caaccttatg gcagccaaga gtcctggggc |
| | gctcctcctc attcctgatg |
| 38581 | ctcctccgca ttcctgatgc tgcgaggagg gcaggccaca |
| | gcgacgtgcc cctgacccct |
| 38641 | ctctgcaggc accagggctg cccactacaa ggatcccagc |
| | aaagcaccag ctccttccta |
| 38701 | gagggcttat tcggcttctg tcatcctcta cagcagtgga |
| | ttgtggcccc cYcccagggg |
| 38761 | gtactgacaa aagctttgga ccctctatta cttaggatat |
| | agatttctgt aacaaagaaa |
| 38821 | tccgaaataa tagctgctta aacacaataa acagttattt |
| | ccctctgttg cgttctgagc |
| 38881 | atctgcagcc ccgcgggatc aggaggctgc agggtgtcag |
| | gcacgcaggc cccttccacg |
| 38941 | tgttctcagc cagccccagg catgacctca tcccagggtc |
| | ctggctgact ggcctgacca |
| 39001 | ccacacccac tctgctcaca gcccgttggc ctgaacYtga |
| | tcgcaggacc ccaccctagc |
| 39061 | tgcaagggaa actgaggaat ttatttcagc taaatattga |
| | gaccagctaa aagttaagtg |
| 39121 | gtacagaatg gagggagaga ttggagaaga ctttagggcg |
| | gacccagcca tctttgtaac |
| 39181 | agagcctctc cctggaaaac tggacagaag gatcatttca |
| | gaggttcatg gccactcctg |
| 39241 | aagcctgttc acaacccatg ggctggatga tctagtgggg |
| | cgggggactg ggcagcagct |
| 39301 | tgttttcctg attttggcct ccaggagccg atggtcaatg |
| | gactgccctc tgcaggggca |
| 39361 | gggctggtgg tcagctgggg cggggtggga gctggaggtc |
| | cgtggtcacc agctgccctg |
| 39421 | actaatgtcg ttacttgaat ataaccctgt gaaggcagga |
| | accacgtctg tctggttcac |
| 39481 | ttcccacggt ggttgagaca tagtgggcac tccggaagta |
| | tttgttgaat gagtgaaagc |
| 39541 | cccgctgggg gaaactgggt acagctcttt cctcagtttc |
| | cccatctgca ctctgggctg |
| 39601 | aatgctgggg ctcctcccaa tctccctgaa gctggacctg |
| | agcccagtag ggacacacag |
| 39661 | ggtccagcca gcgtcctggc ttcctccagg gtcatttcat |
| | ctacaagaat gtctcagagg |
| 39721 | acctccccct ccccaccttc tcgcccacac tgctggggga |
| | ctcccgcatg ctgtacttct |
| 39781 | ggttctctga gcgagtcttY cactcgctgg ccaaggtagc |
| | tttccaggat ggccgcctca |
| 39841 | tgctcagcct gatgggagac gagttcaagg tgagtgggtg |
| | gggctgggct gctagggRat |
| 39901 | ccagatggca tgtggtatgt gtgtgtgtgc acacgcatgg |
| | ggaggaggga ggaaactcgg |
| 39961 | aaacttggtg gtgggcaaaa gaactaagct ggagcaatag |
| | cagtgaagtc cagactgggc |
| 40021 | acagtggctc acacctgtaa tcccaatcct ttgggaggct |
| | gagatgtagc aggacgaacc |
| 40081 | gcagacaaaa ctcctcagac actgagttaa agaaggaaag |
| | agtttattca gccgggagca |
| 40141 | tgggtaagac tcctgtctca agagcggagc tctccgagtg |
| | agcaattcct gtccctttta |
| 40201 | agggctcaca actctaaggg ggtctgcatg agagggtcgt |
| | gatctattga gcaagtagca |
| 40261 | ggtacgtgac tgggggctgc atgcaccggt aatcagaacg |
| | aaacagaaca ggacagggat |
| 40321 | ttttacaatg ctctttcatg caatgtctgg aatctataga |
| | taacataact ggttaggtca |
| 40381 | ggggtccatc tttaactacc aggcttaggt caggtaggcc |
| | caggcctggt ttcgggtctg |
| 40441 | gttccttggt ttcgggtctg gtctctaggc gttgggctac |
| | ctgcctttag tttcgcttct |
| 40501 | ctttcttttt ctgagtataa aacaatataa aacaatatga |
| | gagggtctgt ctctcttctc |
| 40561 | tcagagacag gagggtccct ggaggccagg agttcaagac |
| | cagcctgggc aacatgggga |
| 40621 | gacccctgtc tctacaaaaa taaaaataag tttaaaaatc |
| | agctgtgcac ggcRgtgcat |
| 40681 | acctatagtc ccaactactc aggtggctga ggagggagga |
| | tcacttgagc ccaagaggtt |
| 40741 | gaggctgcag tgagctatga tggcaccact gcactccagt |
| | gtgggtgaca gagtaggact |
| 40801 | ccatctcaag aaaaaaatac agtccagcat ttattggagt |
| | caactatgtg ttgccagata |
| 40861 | gatagatgga tagatagaca gagtgatcaa tagatttagg |
| | tatagatata acttggcacg |
| 40921 | tagtaactgt gcattaaata taagttgata ttagacttac |
| | atttattgca gttatatttg |
| 40981 | ctacactttg ttttgttgca ctcatcctgt gaaataagta |
| | ctgttacctc tgttttgcaa |
| 41041 | acaaaaaaac cacaaagctc agagaaggta ggtgacttac |
| | tgaagatcac acagcctgta |
| 41101 | agaggtggcc ccaaagcctg tactcttcac ctatactgta |
| | ctagaaatgc ttaggtagtt |
| 41161 | tccaggctgt gcttgtcatt gaactcatga ggaaactgag |
| | gcccacagag gggaagagac |
| 41221 | ttgtgcgagg tcacacagca tgtgtggggc acagtgggga |
| | gcagaagcca ggcctccagc |
| 41281 | cgggacaggg gttccctgtt ccacaccctg cccagagcat |
| | ctcacatgtt gtctgggagg |
| 41341 | ttgggagttg cgtctgagga ggggtccagt ccttgaaact |
| | gcccttggtc cctgcgaagt |
| 41401 | tttcttctga ggagtggact ttactccacc caccctccaa |
| | cttcctcatt tcttttcagg |
| 41461 | cagtgctgga gacctggggc ttcaacacca accaggaaat |
| | cttccaagag gtaactgccc |
| 41521 | cctgcccctg tgtggggttt atctcacgta ccccaatcct |
| | gctctggctt caagagcccc |
| 41581 | cacacagcca ataacaccac caatggcaac aattataaca |
| | gcgaacacag ctcctactcg |
| 41641 | gttgttcggc atggagtgaa gcacttagtg tgtgtgactt |
| | ccttcagtgc tcacaccgac |
| 41701 | cctatgagtg gggcggtcaa actgtcccca ttttacacac |
| | agggaaactt agtgaatggc |
| 41761 | aaggctgggt ttgagcccag ctctattgcc cccaaagata |
| | aggctccatt ccctgctcca |
| 41821 | tttcccaggc atagRgactt gtagggggct ggaaccccag |
| | gatcaactct gggctcagag |
| 41881 | ggccccagca ataagtgact gttgattact cctgatccca |
| | aagctgactt caggcaagct |
| 41941 | ccttggaggt cgcagcccct tcttgctatg cccagtggca |
| | atgatgttca taatcccact |
| 42001 | cctcagtgca gggttccact aagaacccat gatctcctac |
| | ctcaaatgga cctcatgctt |
| 42061 | tctgagtaag cctccctcag ctttctggtc acctcactcc |
| | ccccacccac tgcaatgact |
| 42121 | tcttcaggcc ttccctgcca tcctcaaatc tccagctgcc |
| | ccctcctgtc taccttccac |
| 42181 | ttccctctcc acacacaacc tgcttaccag agagctgagc |
| | agagccacca acagaacttc |
| 42241 | ccccccacgt cgctgctccc agtcgcaacc cactcaccca |
| | cacctgcgcc ttcctgcggc |
| 42301 | cgttctcctg ttctaacaga ggacRgtccc tcttcccttc |
| | tgaactcagg ccgtccagcc |
| 42361 | ttccccggct ctgtgatgYc tctctccYtg cacatacaca |
| | actcacaata ttgggcaggc |
| 42421 | ccctgaccgg cYcttctccc ttagcccctt gtctgagtcc |
| | tgttcctttg atgtcctatt |
| 42481 | tctagtcttt ccatttctct ctgtctctac ctcctcccca |
| | ggctaccatt atctctagtg |
| 42541 | gggacccatc tgtagctccc ggtgggtctc cctgtgtcct |
| | gataccctcc aataatctgt |
| 42601 | tccccacagc agccagaaca atcttttcaa gaaataaaac |
| | tggtcattca cctgcctgct |
| 42661 | taaagccggt gtaggataca ggctaaacgc tctcccatgg |
| | cctccagggc cctgcatttt |
| 42721 | ctcatcctgt ctacttcttc atctagttgt ttcccaccca |
| | gcgtaattgt aactgtttag |
| 42781 | ttgaaagttg acgaggtctt ttgtcagctc tagaaatttc |
| | ttttcttttc tttctttttt |
| 42841 | ttttttttaa gacagagtct tgctctgtgg cccaggctgg |
| | agtgcagtag cacaatctca |
| 42901 | actcactgca acctccacct tccgggttca agcaattctc |
| | ctgcctcagt gctgaaatta |
| 42961 | caggtgtgag ccacagcacc cagcccatca gctctggaaa |
| | tttcttcatc actctctctt |
| 43021 | ccatgattgc cccatcccta ttttctccat gcctacctcc |
| | tggaatttcc atgagacaca |
| 43081 | cgttgggcca tctcattcca ttttccgtgt ctcttagttg |
| | ctctgtcgtg ttttccatct |
| 43141 | cttttatctc tatcctaaat tctggatagt ttcttcaagt |
| | atctttttag ttcattaatt |
| 43201 | ctttttacag ctgtgtctta tttgtttact tacccactga |
| | gattttcatt ttattttatt |
| 43261 | taattaatta atttatttat ttttgagaca gagtctcgct |
| | cttgttcccc aggctggagt |
| 43321 | gcagtggcgc aatctcagct cactgcaacc tacgcctcct |
| | gtgttcaagc aattctcgtg |
| 43381 | cctcagcctc ccgattggct ggggttacag gggtgcacca |
| | ctgtgcccag ctcatttttt |
| 43441 | tgtattttta gtagagacgg ggtttcacca tgttggccag |
| | gctggtcttg acctcctgac |
| 43501 | ctcaaatgat cctcctgcct cagcctccca aagtgccggg |
| | attacaggtg tgagctcccg |
| 43561 | caccccgccg gccctttctt tcttttgagc tgagctatgt |
| | atttaatgaa accttttctt |
| 43621 | gtgtatccag cRgttcagtg gtttcttggg gcatgtgatc |
| | tccttgagcc cagtcccaca |
| 43681 | ggctgtaatc gaaggtcctc aggccacact ccccagcccc |
| | gctggctgcc tgcgcattcc |
| 43741 | ttatcttggc catgttcctt ccacagggct cttgtccaca |
| | ctgtcccctc tgccagaatg |
| 43801 | gtttgccctc ccccatgcca cctgctcctc ctcctgccac |
| | ctcagggaag gcctctccca |
| 43861 | cctccctgac taggtcaggt cccctcgtgc cacagcctRg |
| | tgtgtctctc ctttaaatac |
| 43921 | tcctcagctg cagttttacg ttctgttctg ggatgccctg |
| | gaaaatgctg ggctcctgca |
| 43981 | gatatggccc gcagctcctg cgctctctgc tctatcccca |
| | cccctagccc agctgctaca |
| 44041 | gcagcttccc tcggagggtt accatgcagt aggtcctgtt |
| | ctaagctctt tccacagatt |
| 44101 | atctcattcc atcctcagga caaccctatg aggtaggatc |
| | tatgattatc cccattttac |
| 44161 | agatgaggaa agtgaggccc agaaggctaa gtgaaggcat |
| | cctcagcaca tcctgagaga |
| 44221 | ggagttcagg gtaggaatag cttcactagc acacagatga |
| | gaaactgagg ccYagagagg |
| 44281 | acaagagtcc taatttgcac agcctggggc ctgggcacta |
| | ccccgagcta cttccttttc |
| 44341 | cccagccctg gggcccggag ccagctttgt ccttcccatc |
| | tccgagggca tggactgctg |
| 44401 | ctgccctgat gggcccctgt cctggccatg ggacccctgt |
| | cttccacagg ttgtcggcRg |
| 44461 | cttccccagc caggcccaag tcaccgtcca ctgcctcaag |
| | atgcccaaga tctcctgcca |
| 44521 | aaacaaggga gtcgtggtca attcttcagt gatggtgaaa |
| | ttcctctttc cacgcccaga |
| 44581 | ccagcaacat tctgtagctt acacatttga agaggtgagg |
| | cgggtgcagg gagaggtggt |
| 44641 | ggtgggggaa cctgactcac atatgggccg cagagggcag |
| | gggcctgggg gtctctgaag |
| 44701 | cctccagatc cttctcacca cctctgctgg cactggttgt |
| | ctcttgcaca tggctcctta |
| 44761 | caatcaaaat cacatcatgc aagtaacgag ggggtacaca |
| | cgtggtttcc acagcttagg |
| 44821 | taatattttc tctcttttct tatttttatt ttttttagag |
| | acagggtctc actctgtcat |
| 44881 | ccaggctgga gtgcagcctc acactcatag ctcactgcag |
| | cctcgaatcc tgggctcgag |
| 44941 | tgatcctccc acctcagccc tcctgagtag ctgggaccac |
| | agacaaacac caccacacct |
| 45001 | ggctaattta aaaaaaaaaa tttccttaga ggcggggtct |
| | tgttatgttg tccaggctgt |
| 45061 | tctcaaactc ctggcctcaa gcaattctcc tgccttggcc |
| | tcctaagttg ctggggttat |
| 45121 | aggcatgagc caccatgcca agcatatgtt ctttcattct |
| | tatttttatt tattatttat |
| 45181 | ttatttactt atttattttt ttgacacaga gtctcactgt |
| | gttgcccagg ctggagtgcg |
| 45241 | gtggcacaat ctcggctcac tacaacctct gcctcccagg |
| | ttccagcgat tctcatgcct |
| 45301 | cagcctccca ggtagctggg attacaggca tgcgctacca |
| | cgcctgacta attttttgta |
| 45361 | tttttagtag agacagggtt tcgctatgtg ggcccagctg |
| | gtctgagact cctggtttca |
| 45421 | agtgatctgc ccgcctcagc ctcccaaagt gctgggatta |
| | caggcatgag ccaccacgcc |
| 45481 | cagccaatat tctcctcctt aagctgagca gtggacaatg |
| | gtgtttatta cccgagtcca |
| 45541 | caacccttta ttcattaggg ccacaagggt ttccaaattc |
| | agaacttctg tgaatttgta |
| 45601 | aaagtagtat agtgtataga cactggatat attgcagaac |
| | accccaatag ggtgtggggt |
| 45661 | ggcaccccac aatcaattct cctcaaatgc ctcaattggc |
| | atttctcctc atatgaagca |
| 45721 | agataaatac catacatagc ttcctagaca atggccaggt |
| | tttgccaaca aaacttaaga |
| 45781 | aaaaacttgt agttttcaga tcctgtttga ttttataatt |
| | acaaataagg aattaagaat |
| 45841 | cagtattatc tttaatgctc cttagaatat cttcaatttt |
| | tttttttgag acagagtctc |
| 45901 | actctgtcac ccaggctgga gtgcagtggt gcaatctcgg |
| | ctcactgcaa cctccacctt |
| 45961 | cctggttcaa gcgattcgcg tgcctcagcc tccccagtag |
| | ctagctggca ctacaggcgc |
| 46021 | gtgccaccac gcccagctaa tttttagtag aggcggggtt |
| | tcaccaggtt ggccaggcca |
| 46081 | gtttcaaagt cctgacctcc agtgatccac ctgcctcagc |
| | ctccaaaagt gctgggatta |
| 46141 | caggcatgag ccactgtgct cggccaatat ttcttaatac |
| | attaagaact aaagacaaga |
| 46201 | gcgatacaat cacattgtgg aaaatataga aaaatagaaa |
| | gaagaaaacc actgtcacca |
| 46261 | taaccccctt ctccaggggc cttcgatgtg gtgactgggt |
| | gcatttcctt ctggtgcttt |
| 46321 | gttattttta aataaatttt ttatcttgga gtaactttat |
| | atttgaataa aagttgcaaa |
| 46381 | atacagagtg ttcccatata tcccccaccc acttcccgct |
| | ttgtccacat cttacataac |
| 46441 | catgctacag tgtcatagcg gagagattaa cattggtgca |
| | tgactgttaa ccaaactcta |
| 46501 | aactttattt gaatctcccc agtttttcca ctgatgatac |
| | cctttttctt ttccaagatc |
| 46561 | tgatccagga tagcacattg tatttagccg ttcttttttg |
| | ttgttgtttg tttgtttgtt |
| 46621 | tgtctgtttg tttctgccca ggctggagtg cagcggtgat |
| | cctcccacct cagcttctcg |
| 46681 | actagagatg tgcactacca cgtatttttt tgtagagaca |
| | gggttttgcc acattgccca |
| 46741 | agctggtctc aaatccctgg gctcaagtga tcctcccacc |
| | ttggcctccc aaagtgttgg |
| 46801 | gattataggc atgagccact gtgcccagtt tatttagcct |
| | tttaaatatc tctttaattt |
| 46861 | ttgtattact ttccttttca tttttctgtt ttattccttt |
| | tggctttctc atgtggatgt |
| 46921 | agacatatta ttttatttac ttattttttt gttgttaaga |
| | atctgaaaca ttgagcattt |
| 46981 | gttaaaaaaa agaattattc sgccgggcac ggtggctcac |
| | gcctgtaatc ccagcacttt |
| 47041 | gagaggctga ggtgggtgga tcacatggtc aggagttcaa |
| | gaccagcctg gccaatatga |
| 47101 | tgaaacccca tctctactaa aaatacaaaa attagccgga |
| | catggtggca catgcctgta |
| 47161 | gtcctagcta cttgggaggc tgaggtagga caatcgcttg |
| | aacctgggac gtggaggttg |
| 47221 | cagtgagctg agatcgtgcc actgccctcc agcctgggca |
| | acagagtgag actgtctcaa |
| 47281 | aaacaaaaaa agaaaagaaa agaaaaagaa agtgacttct |
| | caggtcctaa ccccaaagcc |
| 47341 | acaggtgctg gggaactttc ctcggttttc agaagagcag |
| | tagctaagcc tggttcccgt |
| 47401 | gtcatccttg cctctccagt ccctcagtgg aaagaatcag |
| | gggccctgag ctaggagggt |
| 47461 | tgctctctgc ttcgggaaga gccctggctc acagcaaatt |
| | tggtttctct ccccaggata |
| 47521 | tcgtgactac cgtccagScc tcctattcta agaaaaagct |
| | cttcttaagc ctcttggatt |
| 47581 | tccagtatgt gctgcagaga agagaggggg cggtcaactc |
| | cgcaaacctc tccctggccc |
| 47641 | cttggagtca ggcacagggc ggggtgttgg tggggaaatg |
| | tggccccttt cYtctggggc |
| 47701 | atatgggctg actgcaggga gataagaccc tgcctagata |
| | gaatcttcgt ggggaagaag |
| 47761 | gggctccagg aagaatggag ggctgccagg aagaagggcc |
| | tggcaggagg agagcgctgc |
| 47821 | ccgagcaaag gcctggccgc cagaatagca aatctcaagg |
| | gaatagcaaa tctcaagaga |
| 47881 | gtgccccaaa gggcctgagc tatgagacag aagcactggc |
| | tgctattctt agagtttctt |
| 47941 | tcccagggga tgttacagga gggggcccaa tggagggtca |
| | aattatcatc gcttttttat |
| 48001 | ttcaggatta caccaaagac tgtttccaac ttgactgagg |
| | taggtagtct tggatagact |
| 48061 | gggggaaata agtcctgtgg gacctcctgc cttaaagaaa |
| | gcaggcggag ggccctaaag |
| 48121 | gaaatcaggc aaccagacca aaagaatgtg gaccaggtgg |
| | tccatgctgt gtctcttgtg |
| 48181 | acccttcttc tccctgccat gtcttttggg agagcccttg |
| | tgttgcaaaa atgagagtgt |
| 48241 | ggtggtatgg attggggttt aggcagaaca gtactggcca |
| | agcagcgcct ccctggacct |
| 48301 | caattttccc tctgtggaat gggctagcaa tcctgggcct |
| | ccccagggcg aaggaaagac |
| 48361 | cactcaggaa gggcaccgtc tggggcagga aaacggagtg |
| | ggttggatgt atttttttca |
| 48421 | cggatgggca tgaggatgaa tgcttgtcca ggccgtgcag |
| | catctgcctt gtgggtcact |
| 48481 | tctgtgctcc agggaggact caccatgggc atttgattgg |
| | cagagcagct ccgagtccRt |
| 48541 | ccagagcttc ctgcagtcaa tgatcaccgc tgtgggcatc |
| | cctgaggtca tgtctcgtaa |
| 48601 | gtgtgggctg gaggggaaac tgggtgccga ggctgacaga |
| | gcttcccatt tcaccttgtg |
| 48661 | ggcccttccc aggcagagct tcaggtgccc ctcttcccag |
| | tcattgatac ttagcggtcc |
| 48721 | tggccccctt tcctctccct gctggtggYa ttgcacgcca |
| | atgactcggc cagatgccca |
| 48781 | gacccctgtt cttggtttac ctgcagaata ttatctttgc |
| | caccccgcgg gatggctcaa |
| 48841 | cccactttca ggatgcaggt ctcctaatag caacctgata |
| | tagcagaaag acccctgggc |
| 48901 | tgggagtctg agacctagtt ctagcccagc cctgaacctc |
| | agtttccctt tctgtgaaac |
| 48961 | aagaatgttg aacttgatga ttcccaattt tccttttgac |
| | cttgaaatgg tagaatattt |
| 49021 | atccctttga ggtgactcgg atggtagact ctcagacacc |
| | atagcacacg tgtgctgggg |
| 49081 | gtattttgga ccaggctctg ctgagagctt tctgctccct |
| | tccccacaga gtatgttgag |
| 49141 | ctgactgtgc tttccttttg aacatctgct tgtccacatg |
| | gcttaggtag gagaggaagg |
| 49201 | gcgtggaaac tggaatgatc ctagtggggt gtcttggcat |
| | ctcttggcct cattttcccc |
| 49261 | atctgaacca tgaagctaaa actaggggat gtggattaaa |
| | tggttcctac aactacttgc |
| 49321 | aaggagacca ctctgtgtgg ttgcaaagaa cactttgaga |
| | agctgtgtgg gaaagtttcc |
| 49381 | ttcctagcag ggtagactca gctaactgca ggtcatgtgg |
| | ccattgtgga tgggttggga |
| 49441 | gctcaagttt ggggcagaag ggaatttttt ttggcagcag |
| | agtggcaagc cctgccgcca |
| 49501 | ggcaaactct gctcttcctc atcctcagaa gcacttgctc |
| | actctgctaa atcaaagtga |
| 49561 | aacgcatgtt tacagaatat tggtccaaaa gggtctcagc |
| | atctcccact acccagggtg |
| 49621 | gcagagcctc gggccggcct tgctccccaa gaagggctga |
| | ctggggctct gtcccctgcc |
| 49681 | ccagggctcg aggtagtgtt tacagccctc atgaacagca |
| | aaggcgtgag cctcttcgac |
| 49741 | atcatcaacc ctgagattat cactcgagat gtgagtacaa |
| | agcccccctc accagcccct |
| 49801 | gttcctgggg agagaggccc agacaggatt cctggggtga |
| | ctgggggctg ttggggagac |
| 49861 | agacagaggg gcctctacca gcttggctcc ctcctggtgg |
| | cctgggagtc agcccagctc |
| 49921 | Rcccctctct cctactgccc ctcccttcag ggcttcctgc |
| | tgctgcagat ggactttggc |
| 49981 | ttccctgagc acctgctggt ggatttcctc cagagcttga |
| | gctagaagtc tccaaggagg |
| 50041 | tcgggatggg gcttgtagca gaaggcaagc accaggctca |
| | cagctggaac cctggtgtct |
| 50101 | cctccagcRt ggtggaagtt gggttaggag tacggagatg |
| | gagattggct cccaactcct |
| 50161 | ccctatccta aaggcccact ggcattaaag tgctgtatcc |
| | aagagctgSg gagtccttct |
| 50221 | tctgtggctg gcgggtagag ggRgggggaa gggattgtct |
| | caccagtgcc gtccacctct |
| 50281 | tttcagccct tccaaggcag ctgcccccaa accctccaag |
| | cttcatgatg actggaggaa |
| 50341 | gaaatccaaa cttctctcct tgggactcac gatcctccct |
| | gatcaggtcc ctggatacct |
| 50401 | tccaaattta tcccctttaa cccagcactc tccttgtctg |
| | accagcttcc tgcaggagct |
| 50461 | gtcacacact ctctgtccct tggggttcca gtgctggaca |
| | gaaagtgagg gaggaccagg |
| 50521 | gcttcagatc ctgaggatgg tgggagggga aggggccctc |
| | agaggtctgg tttctggtag |
| 50581 | aaatggagga agacagagcc tttaaaaagg caaacgactt |
| | tattccagaa gataaactgc |
| 50641 | tcacgagcct gagcttattt ccagctcacc tttttttttt |
| | tttttttttt tgagacggag |
| 50701 | tctctctgtg acccaggctg gcatgcagtg gcacaatccc |
| | agctcactgc aacctccact |
| 50761 | tcccaggttc aagcaattct cctgcctcag cctctcaagt |
| | atttaggatt acaggcaccc |
| 50821 | gccaccacac ctagctagtt tttgtatttt tagtagagac |
| | ggggtttcac catgttggcc |
| 50881 | aggctggtct cgaactcctg acctgcagtg atccacctgc |
| | ctcaaccccc caaagtgctc |
| 50941 | atgttaaata tggtgaaccc caagtttttc ttcaaagaat |
| | cagtatgtct gtatgttcag |
| 51001 | ctctcttatt ctttgattct ccattttaaa gtttaacttc |
| | ctggttctct tcgccccctt |
| 51061 | gcttctaatt tcagtaaaca accttttcca tcagttttat |
| | tcagtagttc acacctgttc |
| 51121 | ccctggtcac ttgctccatc ctgactcatc ccagtcacct |
| | gctttgacct gagtcacccc |
| 51181 | tggtcacctg ctctgatgta agtcaccttt agttacccgt |
| | tcctaactgt ccttcctgcc |
| 51241 | aaactactca cctcgccact ctggctcata cctctgctct |
| | ctttaaaata gccaatcgga |
| 51301 | attagattag accgtgcggt ccaaccttag ccaacagggg |
| | aacaacatag cagcagggat |
| 51361 | tacctgggtc aggaataaga accccttccc ctcccttgtt |
| | caactgtgct ctcaccattg |
| 51421 | ttccatctat gaggagcacc ctttctacag aaactaaaaa |
| | ttgcttgctg agaaaattaa |
| 51481 | atttatgttt gagtgctatt tctttgcagc agtggagaac |
| | aagcattcct aacactggga |
| 51541 | ttgcaggcat aagccaccgt gcccagcttc cagctcacct |
| | tcttatgctc aaattgtgtc |
| 51601 | ttctccttcc caccctcaag ctacaataca aaaagtttct |
| | tccaaccctc tcagtcttgg |
| 51661 | aaggtagcag gctctatttt ctctgggtgt gtaaagaaaa |
| | tgcctctccc acattagcca |
| 51721 | attgagacgg gaggaagcgc agcaagatgc tggctagtgc |
| | aaggtccctg gggtagaaag |
| 51781 | aatcatgatg gattcaagaa cagtcaagag ggctggtgtg |
| | gccctgaaag caaagaacta |
| 51841 | ggggcgagag atgaggccca accagcaggc agggtcacat |
| | aacaaaggtg ataaaagggc |
| 51901 | ttggccttta tttcagcagc caggagagac agccaggagg |
| | ctggggctgt ggggagctca |
| 51961 | gaagtaagat gccccttcca gtctgggaat atgtgagggg |
| | agggcaccat cttctgagcc |
| 52021 | aggtttcttc ccagcccttc cctgcccttc caagtgcttt |
| | ctgaggcctg tttctcttcc |
| 52081 | tcccctgggg cctaatgcaa gtgtctgact cactaagcag |
| | gagcatcatg ggcgggatgg |
| 52141 | gcggctctta aagggccctg gcagaaggag tcagtgtgat |
| | ctcgccagtc cctgagtcca |
| 52201 | acgtgggaat tctgggtctt gggatattgg cctttgaggt |
| | ggtgacacca gttaggagcc |
| 52261 | acatcccacc caagaatgtc cccttgaaga ggctgggaag |
| | gcccaaggcc cccaccttga |
| 52321 | tgctacaatg acagaatcag gataacttgg cagccctaag |
| | gcagctcttc cttgaatgga |
| 52381 | aacttttatc tgcatgaggg gcagacagag aagtcacttg |
| | gagtcttaac ccttgtagac |
| 52441 | cccagcctga ctgggactcc agaaggtccc agggctctgc |
| | tccagaaaga agggtagggg |
| 52501 | catgccccca gcttccttca gtgaccttgg agaggtctcc |
| | ccagggctga gctgggaggc |
| 52561 | acttccatgt cactgtctca tccaaggagt gcgattagca |
| | ggagatatgg agtccagagg |
| 52621 | gtgagaggct taccaaaatg ggactgacct cYgagcccct |
| | ctcccaaatt ccagcccctc |
| 52681 | catccaagcc tagaagctct gacctagtcc tattgaagtc |
| | ctcctggcct gggtgtgtgt |
| 52741 | tggggggaat cctggctcca acccagttag gatcatttcc |
| | ataaagaagg ccacacctgc |
| 52801 | tgcttcctct ggggaaaaac aagtgctccc caaggccagc |
| | accaggcaga agcacatcct |
| 52861 | gccacctggg ctgctgacct tgggcaggat ggggcccggg |
| | tgtttggcaa ataggaaggg |
| 52921 | tagagggaag gcctggcttt cagacctggg tctaatccca |
| | gctcccccca accccagtta |
| 52981 | ctaattctgc catcctgggg cccctctgtg cctccatttc |
| | ctcttctatt caatgggatg |
| 53041 | ataatacttt ccatgtagga ttctggcaag ggctgggtta |
| | gcccagagga ggagcccatg |
| 53101 | gtggccaaga gcaggggctg cagagctggc ctgcctgggt |
| | ccacccttct gctcctctgc |
| 53161 | ttctgtgtga tcttggccaa attatttagc ctctctgtgc |
| | ctcccttttc tcatctgtaa |
| 53221 | aaagaaagat aacagttgcc atgaagagta aaggagaggc |
| | cgggcatggt ggctcagacc |
| 53281 | tgtaattcca gcactttggg aggctgaggc aggggtatct |
| | caggagttca agaccagcct |
| 53341 | ggccaacatg gtgacccccc ccatctctac taaaaataca |
| | aaaaaattag ctgaatatgg |
| 53401 | tggtgtacac ctgtagtccc agctactctg gaggctgtgg |
| | caggagaact gcttgaacct |
| 53461 | gggaagtgga ggttgcagtg agctgatatt gtgccactgc |
| | actgcagcct gggcgacaga |
| 53521 | gtgagactgt cttaaaaaca aacaaacaaa aagattaaag |
| | gagagagcgg ctgcattttg |
| 53581 | ggaggccaag gcgggctgat tgcctgagct caggagttgg |
| | agaccagcct gggcaacatg |
| 53641 | gtgaaacccg gtctctacta aaatatgttt ttaaaaaaaa |
| | ttagctgggc atgcacctgt |
| 53701 | agtcccagct actcgggagg ctgaggcagg agaattgctt |
| | gaaccggaga ggtggaggtt |
| 53761 | gcagtgagct gagatcatgc caatgcactc cagcgtgggt |
| | gacagagcaa gactccatct |
| 53821 | caaaaaaaag gagagagcac agtgtctggt atatcctaag |
| | tgctccacga gtgccagaca |
| 53881 | ttggttatac ttcatggagg tgaggtacac agaggtgtct |
| | aggtcatgcg gactcactcc |
| 53941 | atcctccagt taaccatgac tccctcccca cccacctcct |
| | gagttctctc tgctgtcaaa |
| 54001 | ctttcctctc atatctccag tttcccaccc aaaagtccaa |
| | acactcaaga ttccttctca |
| 54061 | tctccaaccc ataaaatctg atcggcttct ccacactcaa |
| | gtgtaaatga ctgatggcca |
| 54121 | tttgattgac actggagggg ctggcacatt tttagcacat |
| | ttttagccaa aggtatgatg |
| 54181 | tgctgatagc ggactctcag gccacaagcc agtctgagga |
| | cagggaaagt ttgaggaggt |
| 54241 | cactcttcca gaaccctttg gtgataacct ttctggcagg |
| | cctggtaccc ccagagtgaa |
| 54301 | aagggctcca gggtcaagac ccagctctgc ccctcattgc |
| | tgtgtgacct tcagcaactc |
| 54361 | acttgattta tctggacctc agcttcttca tctgtctaat |
| | gggataataa tctttgtcct |
| 54421 | gccctcctca cagggctgtt cagaattaaa tgcatctgaa |
| | aatgatctgc atttgtgtct |
| 54481 | tggactgtgg ttatttgttc aagtgtctgt ctaccctgcc |
| | tgcacaggga gcgggtcagg |
| 54541 | gtcttccctg ggacttcatg cacaggtctt tcctgggact |
| | tcatgtagga ccagccatcc |
| 54601 | cgtcagtgct cagtgaacat gagctgcttc cctgtgggat |
| | gtctgggagg tgagtggaag |
| 54661 | gccttcctag caggcacata ctggaacata atcaatccct |
| | cccatgcata cagctcacac |
| 54721 | ccacattctt atccattccc accatgcccc tcagtggcct |
| | ggggagacta ggaatacccc |
| 54781 | acttgacaga taaggaagct gaggccaggg gaggtcaagg |
| | catttgtctg aggttgcaca |
| 54841 | accaggagtg gtgaagctgg gagtcacaca caaggaatca |
| | ctgcaaagtc tgtgtccttc |
| 54901 | ccactctgag taggacttga accagggatg tccgatgctg |
| | atgcttgtgt cctgaccact |
| 54961 | accttgcagc gtcctcaccc acacccaccc caggcctggg |
| | aggcagggga gcaccagcgg |
| 55021 | tctgggagtg aaagttgctt ccctgtggga tgtctgggag |
| | gtgggtagaa ggccttccta |
| 55081 | gcaggcacag ctgcccaccg gatgagtatg tccaggggga |
| | gaggagcccc ctgtcccagg |
| 55141 | atgtgggcaa aaacctggag aagctgaagc tggactttga |
| | ggatggcccc tgacYccatc |
| 55201 | ctgggacagc cacctcccct tccttctgcc ccctccagtc |
| | cctcctctcc ttccctgctc |
| 55261 | tccctcctac ctctttccat ctcccccttt ctgcctgtga |
| | ttcctcctgt gactggggca |
| 55321 | agatccttca cctctgtcct ccctgagcct cagtggctca |
| | cctggaacat agggtgatgc |
| 55381 | ctgcagaagt attttagggt tactttatga gataaattgg |
| | tagactgttt ttcccgggtc |
| 55441 | agccagccag gggttcggtg aataggagcg aacgctgctg |
| | ccattccctt ctcccctagt |
| 55501 | tcatcctgga ggctctccgc tctccccctg gttctaagtc |
| | ccctcctcct gcaccgtatc |
| 55561 | ccccctccca tccaacccag tccccactga ggcactgaga |
| | cagggtcttg gcccagggtc |
| 55621 | cccacccacc tgagctccgc atgtgagccg accttcaccc |
| | gcctgcctca gtttcccgtc |
| 55681 | cacgaaaggg gtgagcgccc ccacgtctcc tgggactgtc |
| | cttgggtccg atgcggggat |
| 55741 | gtggggaggt gccagggtgt gggcgcagca gggagcgggt |
| | gtgttaggcc cccgcccatc |
| 55801 | ccgcgcccga gccccatctg gctcgggctg gcacctcgaa |
| | tccacgtgat ttctcggcag |
| 55861 | cagccgccag ttccatgcac tggcggagca gctctaggcg |
| | gcggcttcta ctttcagttt |
| 55921 | cgtgcagagc gcggaggagc cgcgagcgct gagggtgagt |
| | gccgggagct ctgagggtga |
| 55981 | gtgccgggcg tgccgcgggg ctgcgggacc cgggctgggg |
| | cgagcggaag ggagaggatc |
| 56041 | ggggttcgaa ttctgcacgg agaggggtgg aggggatgtc |
| | agaggccctg gagcgggagg |
| 56101 | tgcgggtggc cgggtggctg gccgatggat agctgggtaa |
| | gcggacaggg cgccagtggc |
| 56161 | ccggcagcgc gcacagcatg cgccccggca gtttggagga |
| | agagttgccg gcccgcagag |
| 56221 | gatggcagat gagggtcgcc tggatggggg gacacagtaa |
| | gcggctgtgc tcccctccct |
| 56281 | gcgcagctcc tgtcacctac cggatccacc cactctctct |
| | gtcttttact ttgcaacttt |
| 56341 | tcattgattt taaaacaatt acggaagtta cactgttcat |
| | tgtaYgcaat ttagactttt |
| 56401 | tggcctaaac aactttttat tgtggaaaat tccaaacata |
| | tacaatagta gaaggaatag |
| 56461 | aattaggttg agccttctgc acctgcgggt tttcatataa |
| | tgaagcccca cctatccacg |
| 56521 | ttcagcttgg acagtcacga ccccaaggcc acctactcac |
| | gaccccaagg ccacctaggt |
| 56581 | agcccaatct ccaccgctgg ttattttgaa acaaatggca |
| | gacagcatag catctcaact |
| 56641 | gaggtatttc agaatgtact aaaagataag gcatctttta |
| | aaaacaaaac cacagtacca |
| 56701 | ccagcatact acaaacattt taatagttat tccttaatgt |
| | caaatctcca gattatttct |
| 56761 | aaggaacatt taacctcata agtgataggt gaatacgtgg |
| | gtgttgtttt gttacttgct |
| 56821 | ttctgcattc ccatgtggtt ttcggtcact attctcaccc |
| | agaaagccag gacctgaaac |
| 56881 | tggctggggt gatcattcga ggaggtcgga agaggctcct |
| | accttcagtg ccgtttgcgt |
| 56941 | ccattttata agttggagtt cttatgtttc cttttttaaa |
| | aggttgaagt ttctgcagac |
| 57001 | ctaaaaagca gtttgaaaac tggcagttcc cagcctctaa |
| | aacccggggg tagcaggagg |
| 57061 | cagagagtac cccggggcca gatcctggag cctcattgtc |
| | ccttcaaaYc accttccgtt |
| 57121 | tctctaaggg agaaataaac cttgaaaagc catgggcttt |
| | tcagatgtat ctagatgtat |
| 57181 | ctgatgcttt tcaggtgtat ctagactccc atccagcgtg |
| | ctttctgcaa aacttactga |
| 57241 | accatagccc agaatggcca tccatgatgc ccacccgcct |
| | tgtctcctga agcacattgc |
| 57301 | caggtggacc tgcacatggt gtggacggca gacagactgg |
| | ggctctcaac aactggtatt |
| 57361 | tgctggatga ccatgaacta accattcaat ttctcgaaac |
| | tttggtttct cgtctgtaaa |
| 57421 | atgaacatat gcaaatctat cctacaaagt gtgttttgtg |
| | gattgaatga gatgatacac |
| 57481 | gcccacccag tgccttgatc aaccttaaaa tgctgcacaa |
| | gtgtgagggg agatggatcc |
| 57541 | ttgaagaaga cagacaagca gaggggaaag atcttggaag |
| | agtttcacaa tatgctgaac |
| 57601 | tttattcctg gatcagaYac agagctgtcc gggtgtccac |
| | agggccgggt cagcctcctc |
| 57661 | agaccccaac acacataccc tcttcccctc tgaggaaaat |
| | tcagcaaaac ttcttttgct |
| 57721 | gttgttgttc tttattcctt tttttttttt tttttttttt |
| | gacgaagtct cactctgttg |
| 57781 | ctcaggctgg agtgtagtgg cacgatcttg gctcactgca |
| | acctccatct cctgggttca |
| 57841 | agcgattctc ctgcctcagc ctcccgagta gctgggatta |
| | taggcgcccg ccgctacacc |
| 57901 | cagctaattt ttgtattttt agtagagatg gggtttcact |
| | atgttcgcca ggctggtgtc |
| 57961 | aaactcccaa cctcagatga tccacccgcc tcggcctcct |
| | gtgggattat aggcgtgagc |
| 58021 | catcttgccc ggactccttt tttttttttt tttttttttt |
| | aatagacatg aggtctcaaa |
| 58081 | ctcctggcct caagtgatca gtctgcctct gcctcccaaa |
| | gtgttgagat tatgggcgtg |
| 58141 | agccaccaca cccagccata acttcttagc atgacttttc |
| | ccatttgtta tgagttcaat |
| 58201 | tgtgcctccc cacaaaagat atgctgaagg cctaaccctc |
| | ggcgcctcct aacgtgacct |
| 58261 | tatttggaaa tagggctgtt gcagatataa ctggtgaaga |
| | tgaggtcata ctggagtagg |
| 58321 | atgggccttg aatccaatag gaccggtgtc cttataagag |
| | aggagatgga cacatgaaga |
| 58381 | cagagacata cggggatcag acaatcatgg acggaggagg |
| | aagagagtgc ggcgatgcat |
| 58441 | ctaggagcca caggacacct agaatggcca gcagccggtg |
| | ggaaccagga gaggcaagga |
| 58501 | cggatcctct cctccagcct tcagagggag cccggccctg |
| | accacacctc gatctcagac |
| 58561 | tctgacctcc agaactgcga gagaagaaat ctcagttgtt |
| | ttaatgtacg cagcttgtgg |
| 58621 | cactttgtga cagcagatac agcagtactg tgacaacact |
| | aggaaacgaa tacaccatcc |
| 58681 | cagcatctct gctctgtttt ccatacagaa ttgaactaag |
| | gaccaggcaa gctaatgcaa |
| 58741 | Rtccaaacac tgtaaaaact ttggaggcaa tctaaggatg |
| | tgagccagat ttgtttgcca |
| 58801 | gatctttttt attttattta tttatttatt ttattttatt |
| | tttttttttt agtgagaggg |
| 58861 | agtctcactc tgttgcctag gctggagtgc agtgatatga |
| | tctcggctca cagcaacctc |
| 58921 | cacctcccag gtttaagtga ttctcctgcc tcagcttcct |
| | gagtagctgg gattataggc |
| 58981 | acctgccccc atgcccagct agtttttgta tttttagtac |
| | agacaggatt tcaccatgtt |
| 59041 | ggccaggctg gtcttgaact cctgacctca ggtgatccac |
| | ctgccttggc ctcccaaaat |
| 59101 | gctaggatta caggcatgag ccaccaacac ccagcccata |
| | tattcatatt tttaatggac |
| 59161 | ttatacatga aaatggtatc tcacttttaa aaataaatga |
| | tatggaatta tgcgttaaag |
| 59221 | gRaaattaaa tcttattata tcatgtttta aaatttttaa |
| | tttttcatag ctaatacatt |
| 59281 | tatgtagttt taaaaatgta aaacatttgg aaagatataa |
| | tgaaaaataa gtctccttcc |
| 59341 | atctcctgtc tcccagccac ccaattgccc tccccgaaga |
| | caaccaatgt tatcaggttc |
| 59401 | ttgtgtctcc ttccaaagac agtctaagtg tgtttttaca |
| | aacatggata tatacatata |
| 59461 | tatatacacg tatatatgtg tatatatata tacacacaca |
| | cacacacaca catatacaca |
| 59521 | tatatagaca cacacacaca tgtgtacttt tcccttctca |
| | caaatggcag tgtactatat |
| 59581 | gtagtgttct ctaacttggg tttttttttt ttaaacttag |
| | tgcaatttgg aaatctttct |
| 59641 | acatcaaaat tttaaaatct gccctttccc tctttctttt |
| | taacagctgc ctagtatttc |
| 59701 | accgtatgac tgctctgtaa ttgatctaac agttgtagaa |
| | cacttaggtt atttcctgtc |
| 59761 | ttttgctatt tcaacagtgc tgtaatgaat atccttggtc |
| | aggcatcatt tttcatacgt |
| 59821 | gggagtgaat ctttaagaaa accaggagtg gatttgcaag |
| | gtcaagggga atatgcagtt |
| 59881 | tgaacttgga taaataaggc aaattatccc cccttaaatg |
| | ttgtactaat ttttgctccc |
| 59941 | accagctgga gggggagggg ccaaatttcc atatttgcaa |
| | atctgggaga cgaacaatgg |
| 60001 | tgtgtttttt atgcctctta ttacgaatga gtttgaacat |
| | cttttcaaat atttaagagt |
| 60061 | cacctgtagc tcattttcca taaactgtca gttcatatcc |
| | tttgcccact tttttattgg |
| 60121 | cttttggtct ttttcctgtt gagttgtaaa agcacttttc |
| | atgttaaggg aatttgctct |
| 60181 | ttgtctatta tatggttata ctgtcattta aaatggtggc |
| | atagttgctt atagaatgtc |
| 60241 | tgaaccatat gcgtcattgt tagatattta tattgggtct |
| | cattttcttg tattatatat |
| 60301 | gggatgtttt ccctgttttt tgtaaaaaaa aaaaaaaaag |
| | caagatatga cattttaatt |
| 60361 | cttccaatag ttctcaccat aatggtgaag gaaaggaaat |
| | acgtttggga aaatacttcg |
| 60421 | ataggatttg gggtggctgg aacctgtgtg caaaatggcc |
| | aacagggacc aggaccattt |
| 60481 | tgggtgggaa gagagtgctt tgcatggtgt atgtgtatgg |
| | ggcggagggg ctgtatttgc |
| 60541 | tcctgaaaga aaagggggtg gagggagggg agaagaaagg |
| | aaggagagaa ggtggaggga |
| 60601 | ggttagccac agagggagat gactcccaga aacttcttag |
| | gggaaggatg gcaaaagggc |
| 60661 | attttcggtg agtccaggaa tgccctctgc tccgtgtgag |
| | gcaggtacca gcactgcaga |
| 60721 | caccggctct ggctcaccac ctgccatcat gagtgcattc |
| | agcttctcca Ytgagcttcc |
| 60781 | acacaccagg ccctgctcta ggcactgggc tacagccggg |
| | aacacaacca actccctgcc |
| 60841 | ttgtggagct gatgaggcag tagaaacaga caaacaagta |
| | aacaaagatg tgcatgtcat |
| 60901 | atgaggtcag gtggaagtga ctgcagtgaa gaaggcaagg |
| | caggcgaggg tggagcatgc |
| 60961 | tRgatagaga ggcagatgta gccttcttgt agggatgttg |
| | ggacatttga gagagaactt |
| 61021 | gaagggagcg tggcagggaa ccatgggcca tggcatctgg |
| | aggaagaggg aaccagtcag |
| 61081 | aggggatggc aagaaacaaa aaagtgggga gaagaagaaa |
| | gcagagaaga ggagaggagg |
| 61141 | gagaagagga gaaaatgctg cttaaagtct gcttttgtgc |
| | tcccagatgc tcattgtgaa |
| 61201 | tgacattttt gcaatttttg caattttgtt ttgtaattta |
| | ataatgggct gggctgggcg |
| 61261 | cagtggctca cgcctgtaat tccagcactt tgggaggctg |
| | agatgggcag atcacttgag |
| 61321 | gtctgcagtt tgagaccagc ctggccaaca tggagaagcc |
| | ccgtctctcc taaaaataca |
| 61381 | aaaatagcca ggtgtggtgg cacgtgactg taatctcagc |
| | tactctggag gctgaggcag |
| 61441 | gagaatcgct tgaacctgag aggtggaggt tgtagtgagt |
| | tgagatcgtg ccatgctctc |
| 61501 | cagcctgagt tacagaggga gactcggtct caaaaaaagc |
| | aacaaactgc ttgaattaaa |
| 61561 | gcaggagccc tcagctagag gagtgcccac ccacctcctc |
| | cccaggaatc gcagagctcc |
| 61621 | caggagaggc catagcctcc tataggtcat ggcattgcag |
| | gtgggttggt gtcccagctg |
| 61681 | gctgtttctg tctcaagaaa ggaagggctg ctcccgctga |
| | catccaggcg taagcaacgc |
| 61741 | cctggtgaac atcctcgtag ctagagcttt gctcacattc |
| | tggatggctt ccttaggctc |
| 61801 | aatcctcaaa gtggactcct aaagggatat atgaactttt |
| | attttttaaa tgtttgaaac |
| 61861 | cgtgttgtca aatttctctc ctaaaagatt gtgccaatgt |
| | agagaggctg ccgaccgctg |
| 61921 | gaagcttccc aatcccccag cacctatccc ttgtgggtgg |
| | gatggatcct gtaccatcgc |
| 61981 | cagaccctca agaacccctt gtcctgcaYg gtcccttctg |
| | tccctcctgg tgaaatggaa |
| 62041 | ggagcatgca tgccttggga agctggtgct ttgaggcatt |
| | cagatcttac cgtggcatca |
| 62101 | tgtttgaaga gagaaatagc ttgctgtttt gtgtgtctct |
| | caatagtctt attcactgag |
| 62161 | ttcttgaagg tgtcctgtgt gtttctggac tgcagaatcc |
| | ttttattgaa atggacaggt |
| 62221 | cagtgttttc ccagagaaag acctatccag taggagttca |
| | caagaggatt ttaggaggta |
| 62281 | tgtggagagg gcatccgatt ccattgaatc gtaaagtgac |
| | aaatttgttc ccttttcagt |
| 62341 | tctttttcat tcttccagac tagtgaaaga gaaagcctca |
| | gtcaggtgct aacgcatctg |
| 62401 | taaacctctc acactcttga tattttcagc aaggggaggc |
| | caggcctccg gtcagagccc |
| 62461 | tgggtctgca gcaataccca gctacagttc aacagcatca |
| | tagtgttttt tgttttcctt |
| 62521 | ggctttcttt ctttcttttt ttttctagac aaggtctcac |
| | tctgtcaccc aggctggagt |
| 62581 | gcactggttg cacagctccg tgcatagttt cctgcagcct |
| | ctatttccca ggctcaatcg |
| 62641 | atcctcctgc ctcagcctcc caagtagatg ggactacagg |
| | tgcgcaccac cacacctggc |
| 62701 | taattgtttt ttgtttttat ttttgataga gacgaggtct |
| | cattacgttg cccaggctga |
| 62761 | tctcaaactc ctgagctcaa gcagttttcc tgccttagcc |
| | tcccaaagtg ctgggattac |
| 62821 | aggtgtgagc ctccatgccc cacccttgag tttcttttcg |
| | atgatacctt cagttcgtgg |
| 62881 | caagtggtac ttcaaaaaat aaagttaaaa gtgacatggt |
| | ttctagaaaa gctttaagga |
| 62941 | aatggtgttc tggctttcag ataagtcaaa aaaaatctca |
| | aacatgagta aagagttttg |
| 63001 | gaaattatac acttacccct agagggtgag tttgtggggg |
| | aaatttcata atgtatactt |
| 63061 | ccagaatatt tagaactttc caaatgagta caggttatgt |
| | tcgtaaacag gaaaaataat |
| 63121 | aaagacataa taaaatgata atttagtttt aaaagacgac |
| | catttgttga aagcagtatt |
| 63181 | atatttcagt taggaaatgg cctctggaat cagcatagat |
| | tttattgttt tatttatttt |
| 63241 | gtttttgaga cagtgtctca ctctgttgcc cacactggag |
| | tgcagtagtg tgatcacagc |
| 63301 | ccactgcagc ctcaacttcc tgggctcagg tgatccttct |
| | gcctcagcct cccaaatagc |
| 63361 | tgggactata ggtgcacacc actatgccag gctaattttt |
| | ttgcattttt tgtaaagaca |
| 63421 | gattttcacc atgttgccct ggctggtctc gaacttccag |
| | gttcaagcaa tctgcctgtc |
| 63481 | tcggcctccc aaagtgttgg aattacaggt gtgagccact |
| | gtgcccggcc agcatagatt |
| 63541 | ttaaatccac cttttgttgc ttgacttctt ggagcctgtt |
| | tcttcatcta tgaaatgcag |
| 63601 | gaaacgtgcc tggaaatatt gcttgagatt ctaatgggga |
| | ggtgcaggtg gaatactgta |
| 63661 | gcctgatgcc cagcctatgc cgggaactca gtacataaca |
| | gccaatgagc attggctgcg |
| 63721 | gactggacat gtcccctcct tgtgctgtag tattaatgtc |
| | tccaaccctc acagtgatcc |
| 63781 | tgtgaagtaa atgtaaaatc accacccaga tgaggaaaac |
| | agtggcacag agaggttaag |
| 63841 | aaaactgtcc aaggttgcac agcactaaaa tgttgaaatc |
| | aggatttaaa cccagccctc |
| 63901 | ctgaccccag aggatctttt ttcaaaaatt atgttctttt |
| | attttatttc gagatggggg |
| 63961 | tctttcacag tcacccaggc tggagtgcag tcacaatatc |
| | acggcttact gcgcctcaac |
| 64021 | ctcccaggct caagtgatcc tcccacctct gtcccccaac |
| | ccccagttgc ttaggagcac |
| 64081 | aggcacacga caccatgcct ggctaatttt tgtacttttt |
| | gtagagatgg ggtttctcca |
| 64141 | tgttgcccag gctggtctca aactactggg ctcaagcgat |
| | cctcctgctt cagcctccca |
| 64201 | aagtactggg atcacaggtg tgagccacta tgcccagcat |
| | tagaggctct tttaacagct |
| 64261 | ccacaattcc ctgtgagatg ggctgcatac aaagcattac |
| | tcctgcttga catatacaca |
| 64321 | aaccatggcc caaagggagc tgggacttgt ccggatgtca |
| | gcctctaagt cagttttggg |
| 64381 | tcagtgagac ccaaaaccaa ggctctagcc gtctagcccc |
| | tccaaccttt cttctgcccc |
| 64441 | agttttatgg gtttggcaat gtctgccagg atgggaggga |
| | gcagttcaga tgatccagtc |
| 64501 | tggaggcaaa attctgctaa attcaaaggg cccagcctca |
| | agtcactgat gtcttttttt |
| 64561 | tttttttttt actttaaaaa aatgtattMa ttctaaacca |
| | cacaagtaag acacgaatca |
| 64621 | gtcttccttg cagaaagtta aactttttat acataaagct |
| | gatatctatt ttactcactg |
| 64681 | cttccagccc catgcctytc ccctctcctg cagtaacccc |
| | tatttgatat gtttccagaa |
| 64741 | ctttatctaa accttcacat aataaaaata attcttatat |
| | agggcttact aacttccaag |
| 64801 | cactgcttta agagctttac atatttaagc cccacaataa |
| | ctctgtgagg taggtgctgc |
| 64861 | tcttatcccc attttacaga tgagaacatt gaggcccaga |
| | gaggctatgt aactggcctg |
| 64921 | gcgtcaccca gcctgcagtt ggtggaaagg tcagtcccaa |
| | atctaggcag ccttgctccg |
| 64981 | aaattcatgc tcttagcctc taagttataa aacatgctat |
| | tatcgacctg tgggaagaaa |
| 65041 | cagtattgct gtttgttgat gtgtattttg agacaagtga |
| | tatcatgttg tgcatatcat |
| 65101 | tatacaatgt gtcttgttta ttccatgata catcttgaag |
| | atacagccac gtcaacaaaa |
| 65161 | aataagtccc tttcctgtac ataatcccac agcgtggtta |
| | caccaaactt tattatggct |
| 65221 | gtctagggtg tttaaagacc gctgctggaa tttctttatc |
| | caagactctg tgtgtcttag |
| 65281 | cccattgggg ctgctgtaac aaagtgccag agactggctg |
| | gattctaaac aatagaaatt |
| 65341 | tatttctcac agttctggag actaaagtct gagatcagag |
| | tgccagcatg gtcgggttct |
| 65401 | ggcaagagcc cttttccggg ttgccgatgg cggacttttc |
| | attgtatcct cacatggtgc |
| 65461 | aaagcaggct agagcattct cttgggtctc ttttataagg |
| | gcatcaatcc cattcactac |
| 65521 | ggctcctccc tcctgaccta attacctccc ccagacccca |
| | gctcctaata ccctcctatt |
| 65581 | aggggttaga gtttcaacat gtgaatttca ggggagcaca |
| | aatattcagt cgatcacatt |
| 65641 | gtgtattctg ggccccaagg ctgtccattt tgctttctgc |
| | tgagaagttt agtggtaagg |
| 65701 | tcaaagggta gaagcgcagt aagatctaga agtcactgct |
| | gatttgccct acaagatggg |
| 65761 | caaaccactt cccagcctgc agctctgagc cctggatcca |
| | ggccttctct cctttatgtc |
| 65821 | tcgagcttac tctgtcccct gccttactta ccaaaccaaa |
| | gcaagactcc tctgggacat |
| 65881 | tcctgccagg ccccatggca aggttggagc tgaggagggg |
| | acttccaaac cttggtttta |
| 65941 | ttttcacttt ggcttgggtg tgccaagccc tggcagagcc |
| | acagagttgg ggcacgaggt |
| 66001 | gccaagaaac agctcccagt ctgaggaagg tgctctgccc |
| | tgggaagggg ataRagctga |
| 66061 | gtgttggtta tggggagaca tcctcaaggt ctccatctaa |
| | atatggtcaa cttggtggcc |
| 66121 | ttcctgtccc cagggccttt ggRgctctca gaggacaaga |
| | atcactcagc tctgatttgc |
| 66181 | tggagaagca gagccccagg tgggaggtag cgaggagcct |
| | gtctctcccc actgggagtg |
| 66241 | gagagctggg tgccacagcc tcaaacagtt gttcccagac |
| | atcggcacat ggggaacccc |
| 66301 | ccgggagctt ccaaaagtgc cagtgcctgc gttctacctc |
| | ctgggatggt gctgtgatgg |
| 66361 | gtctggagtg tggcccattg ggatttttta aagaccctct |
| | tcccaggtga tgccgtcgtg |
| 66421 | cagacaagca tgggaaccac tggcctggaa gccccaggga |
| | gaggcctctg gggcccggga |
| 66481 | cacgcaagcg ggagccttct cctagcagcc ttgctagcca |
| | cccacccctt cctgtgggtg |
| 66541 | ctagacccaa actgccaggg ctgagcagga gaagcaaggc |
| | caccagctgg ccacctgctg |
| 66601 | tcccagccag gctcaggctg gcagtagggc accccagtcc |
| | tggaggaggg tgcatctgga |
| 66661 | aagcttgggg gctcttggtg gaaagttcaa gcctttagca |
| | taggaaggtg gctggggtga |
| 66721 | aggaggcagt ttaaagacta gtgatgtggg ctgggaccca |
| | gattgctggg tttccaatga |
| 66781 | ccagaagaag atggccttgt tggactgggg acagggacca |
| | cccaggctca ggcctgaggc |
| 66841 | tgggagtgca ggcatgaatt tgagtgcagg ctcaggaaca |
| | tccccagggc cgccaggcag |
| 66901 | ggagacacct cttcaactcc tggctcctcg actctagctg |
| | gtgacctagg caggtccctt |
| 66961 | tcccactgtg agcctcaatt tcctcatgtg taaagcatca |
| | tgactgtgtg ttttaagtcc |
| 67021 | tttagggccc tatctttgtg agggacaaca gagacgatgg |
| | ttttcacagg caacagtcac |
| 67081 | ccctgcatca tcactgactc acagaaatgg atatgcccta |
| | taaggacatc tcttgcttgc |
| 67141 | cctgccagca tttgtgggcg ggggaggaaa tggccactaa |
| | ccattcctga aggcacctcc |
| 67201 | caagggaccc ctgaaaggag ggtgacgcct cccagaaaga |
| | gaccagtggc ccagcccagc |
| 67261 | cctgctctta gttttgtttc ctctgctttg aatgccagca |
| | aggcctttcc ctcccagggc |
| 67321 | ctcagtttcc ccatctttac aatgggcaca gcatagaccc |
| | catcactggg gctctttctg |
| 67381 | ctctgccacc ctgtgcatcc aggctcaggt gttatccgaa |
| | gccctgacat catcagccat |
| 67441 | tcccgggggg aaggcagagg cgctgggttc tctgtgtccc |
| | cctggtaggg cttggtgtag |
| 67501 | gattcaggga ggattggagg gcctctgtgg cctcaggtcc |
| | tcccccaggg tccccaggcc |
| 67561 | ctgacctgtc cacctggacc taaagaacca acaacagcag |
| | cactttctgt ttctttgagg |
| 67621 | tatttctgtc caaatgtctg tagtcatgac tggggtgcct |
| | ggctatcacc ccacaaactg |
| 67681 | catcctttct gatctgcaca gatgagaaaa ctgaggtctt |
| | gtttcccctc catcccaaga |
| 67741 | cctaatggga cctcctcctt aatctaatcc tcaagaggca |
| | gaaacaggat ggaaagcaaa |
| 67801 | ggaatggcag ccagaagtct gYggctccac tcctgtcctc |
| | tctgcatccc tcacttcctt |
| 67861 | ccttacacca ggcgtcaggg gctggagaga cggaagaagc |
| | gatagcaacg acaaccacac |
| 67921 | tagtggtaat catagcttgt gtggattgaa cctttttttt |
| | atttttcatt tttaattttt |
| 67981 | gtgggtacat agtaggtgta tatatttatg ggttacatga |
| | gatgttttga tataggcgtc |
| 68041 | cagtgtgtaa tcacatcagg gtaaatgggg tttccatcac |
| | ctcaagcatt tatcctttgt |
| 68101 | gttgcaaaca attcaattat actttttgtt atttttaaat |
| | gtacagttaa attattactg |
| 68161 | actatagtta ccctcttgtg ctattgaata ctaggtttta |
| | ttcattctaa ctattttttg |
| 68221 | tacccactaa ccatccccac ctcccccacc ctggcctcct |
| | actatacttc ccatcctctg |
| 68281 | gtaaccatcc ttctactctc tatctccatg acttaaattg |
| | ttttgatttt tagatcccac |
| 68341 | aaataagtga gaacaagtga tgtgtgtctt tctgtacctg |
| | gcttatttca cttaacataa |
| 68401 | tggcctccag tgccatccat gtccttgcaa atgatgggat |
| | ctcattcttt ttgatggctg |
| 68461 | aatagtactc cattttgtat gtgtgccaca ttttctttta |
| | ctcttttatt cttttctttc |
| 68521 | tttcgagatg gactcttgct ctgtcaccca ggctggagtg |
| | cagtggcacg atcttggctc |
| 68581 | actgcaacct ctgcttccca ggttcaagca attctcctgc |
| | ctcagcctcc caagtagctg |
| 68641 | ggattacagg catgccccac catgccctgt taatttttgt |
| | acttttagta gaggaggggt |
| 68701 | tttgccatgt tagccaggtt ggtctccaat gcctgacctc |
| | aggtgatcca cctgcctcag |
| 68761 | cctcccacag tgctggaatt acaggcgtga gctgccgtgc |
| | ccagstgcca cattttctct |
| 68821 | gttcattcat ctgtcgatga acacttagat taattccaaa |
| | tcttggctat tgtaaacagt |
| 68881 | gctgtcataa acatagtagt gcagatatct ctttgagaca |
| | ctgattcctt tcttttgggt |
| 68941 | atatacctag cagtgggatt gctggatcat atggtagctc |
| | taaatttagt ttagtttttt |
| 69001 | tttgtttttt tttttttttt gagacagagt ctcactctgt |
| | ctcaaggctg gagtgcagtg |
| 69061 | cgtgatctca gttcactgca acctctgcct cctgggttca |
| | agcgattctc ctgcctcagc |
| 69121 | ctcccaagta gctgggacta caggcatggg gcgccactac |
| | gcccagctaa tttttgtatt |
| 69181 | tttagtagag acagggtttc accatgttgg cgaggatggt |
| | ctcaatctct tgacctcatg |
| 69241 | atctgcccac ctcggcctcc caaagtgctg ggattatagg |
| | tgtgagcctc cgtgcccagc |
| 69301 | cctattttta gttttttgag gtacctccga actgtcctgt |
| | agtggctgta ctaatttaca |
| 69361 | ttcccaccag tgtatgaggt ctcccttttc tccacataga |
| | ttgaggtgtt tgtttgtttg |
| 69421 | tttgtttgtt tgtttggaga tgaagtctcg ctctgtcgcc |
| | cagactggag tgcagtggcg |
| 69481 | tgatctcagc tcactgccgc ctccgtctct tgggttcaag |
| | ctattctccc acctcagcct |
| 69541 | gggattacag gcgcctgcca ccacgcctgg ctaatttttt |
| | ttattttaag tagagacgag |
| 69601 | gtttcctcat gttgcccagg ctgctctcaa actccggacc |
| | tcaggtgatc tgcctgcctc |
| 69661 | agccttccaa agtgctggga ttacaggctt gagccaccat |
| | gcccagcctg gattgagttt |
| 69721 | gtatcatgtg ccaggttcca tgtcagggat tccacatgcc |
| | ccatcccaca accatcttgc |
| 69781 | caggtgggca ttatgatgac cccccatagc agacactgtc |
| | agagctcccc caaccccatc |
| 69841 | tctgcccgga tgcccccact cactgtgggt gacacctgca |
| | tccttcttcc ggggtcgcct |
| 69901 | ttgcctggtg ggcattgcct tgctcagaga tgcctgggca |
| | gtcatgcctc cctcccccgc |
| 69961 | ccaatggggg tgcagtgacg tgaagtgtga ccgaccaccc |
| | agaccccttg cacatgcgca |
| 70021 | ggatggacct cttctatcat cacgctccag ttctcccatg |
| | tggcaggctg aagcRaggct |
| 70081 | tttgaaacca tatctttgct cagctgcctc tgctacccta |
| | tctttcttcc accaccccct |
| 70141 | caataaacaa cttccacagg aacccccttg ggctctgctt |
| | ctagggacct gacctagaag |
| 70201 | atcctcattt tacagatgag gacgctgagg tacgaagagg |
| | ctgcgtaacc taccagggtc |
| 70261 | acacagcttt ggtgtggagt agggactcaa atccagggcc |
| | ctggtacgga ggcatttgcc |
| 70321 | ctcaccaaga ttcaggcact gagagaagcY gacgggccta |
| | gagaatggca agacttgaga |
| 70381 | tagcagaagg aaggagagag ggtgagaaat ggatccccgt |
| | gctgaggtct ggtctggaag |
| 70441 | gagaagtctg caaggtagga aaaagaggaa aggggacgtg |
| | aggtagggaa gcaggatgtg |
| 70501 | caaggcgggg acttgtgaaa gagaatgccg gggggtggtg |
| | agcagcatct catgggcagg |
| 70561 | tcagcaggtg caggagaggc ctaggagggc cggggactgg |
| | atgatgaaag ggcatttgtt |
| 70621 | tatttatcct ttgtttttgt tttttgttgt ttaaattgag |
| | accagctctc acaatgttgc |
| 70681 | ccaggctcgt ctcgccaact gtctgcccac tcctggcctc |
| | aaacgatctt cctgcctcag |
| 70741 | cctccaaaag tgttgggatt acaggcataa gccaatgttt |
| | attcgtcctg agccttccct |
| 70801 | ggacacctga tatgtagctg ctttgtggtg gtcacagttc |
| | catggtgtga ctttatcctg |
| 70861 | gaggcagtgg gatgctgata gcaagttcag acaggcatga |
| | ggccagacca gagctgagtt |
| 70921 | ttcaagataa ctccagccag aggtatgcgt gcatgtgcac |
| | atgtgggtac atgtatgtgt |
| 70981 | gtgcacgtgc atgtgtgtat gagtgtggac tagagatgga |
| | atggctttct gagcaaaggg |
| 71041 | aacagccaag gcaaaggcct gtgggctgca gggagagaac |
| | aaggtttgat ctctgcactc |
| 71101 | cctcctctaa gctctgtgtc aacagcattt tcaggacagc |
| | aggaaggatt cccaaagagc |
| 71161 | acagcagcga gggcagttgg agggaggcgt ctgctgggac |
| | actgaaacca gggYggggta |
| 71221 | aactcccctc gcacctcctc agactcagag cccccataaa |
| | tcttccaggt gcaccccagc |
| 71281 | ccttttccct ctctctgtct gaactggggt ggcatgatcc |
| | caggactgca actccacgtg |
| 71341 | tctggattcc ccttactgac tgcgtgaccc tggccatttt |
| | ccctccacct ttctctcagc |
| 71401 | gcccccattt gattactcgg cctcaggggt gcactgggga |
| | ttcttagagg taacacttcg |
| 71461 | aacggaaagc cagaggtcct ggtgccaaaa tgcaaatgtg |
| | agggcttgaa agttcatcgg |
| 71521 | gttttatttt ctctgttccg tttgcagtag ctcttctttc |
| | ttgttttcta tagaacagta |
| 71581 | aaaaacttta tgcatttgaa tatcgtgaac cttgtaattc |
| | atatgcaata taaaaactac |
| 71641 | tagctatgca tggagaaatc aattgaagaa cagtggctta |
| | gcatgtcttt ctcattcttt |
| 71701 | gatggctacc tcaaatcaaa tcaatatgaa cttggggtca |
| | ggcatggtgg ctcacacctg |
| 71761 | taatcccaac acttggggag gccaaggcag gaggatcact |
| | tgagcgcagg aatttgagac |
| 71821 | tagcttgggc aacatagcgg gacctcatct taatattaaa |
| | aaaaaaaaaa agagaaagaa |
| 71881 | aaaaagtgaa cttgggaggt ttgaatgaca actcgtatag |
| | ctgaagtaat agatatattc |
| 71941 | aacttttaaa acttaatttt cattagataa cacatgcata |
| | tggtataaca ttctaggcca |
| 72001 | ggtgcagtgg ctcacatctg taatcccagc actttgggag |
| | gccaaggtgg gcagattgct |
| 72061 | tgagcccagg agttgaagtc tagcttgggc aagatggcaa |
| | aaccccatct ctgcaaaaaa |
| 72121 | cacaaaaaat tagctaggtg tggtggtgtg cacttgtagt |
| | cccagctact caggaagctg |
| 72181 | aggtcgggga atcatataag cccaggaggt ggagactgca |
| | gtgagccacg accacaccac |
| 72241 | tgcactccag cctgggtgac agagcaatac cctgtctcaa |
| | aaaaaaaagg aaaaaaaatt |
| 72301 | cctttcactg gggacaatta cctttatgaa tttcttccag |
| | aaatattaat gtatttgtat |
| 72361 | acacattttt ttttgagaca gggtctcact ctgtcaccca |
| | ggctggagtg cagggatgca |
| 72421 | atcttggctc actgcagcct ggataccccc aggctcaagc |
| | aatcctccca cctcaacctt |
| 72481 | gcgggtagct tggacaacat gtgtgcacca ccactcctgg |
| | ctaatttttg tattttttgt |
| 72541 | caagatgggg ttttgccatg ttacccaggc tcgtctcaaa |
| | ctcctgacct caagtgatct |
| 72601 | gcccgccttt gcccctcaaa gtgctgggat tacaggcatg |
| | agccaccata tttatttttt |
| 72661 | ctttacacaa aggaagcata ttctacaccc tgttttgccc |
| | cggctctctt ttaaaaaaca |
| 72721 | gtgtatcttg gataccattc catatcattc cataaagttc |
| | atcttcatcc tctttttttt |
| 72781 | tttttttttt tttttgagac agggtttcac tctgtcgccc |
| | aggctggggt gcagtggcac |
| 72841 | tatctcagct tacctcaacc tcccgggctc aagtgatcct |
| | cccacctcag cctcctgagt |
| 72901 | ggctggatgc tgcttctttc tttttgatgg ctgcaaagaa |
| | ttccattgta tagatgtgcc |
| 72961 | ataatttaat cataatatgt cctctttgat catttaggtt |
| | tttccaatct tttgctatta |
| 73021 | caagcaaggc cacgttaaat atccctgggc atattatttt |
| | gcacattatg aagatatctg |
| 73081 | taggctaaat acctgtgtat ggaattgctc agtgtgatta |
| | catggcattt accactttgg |
| 73141 | tagataaagg ttgtatcctg ttacatgtcc acggatgaat |
| | ttcttccaga aatattcatg |
| 73201 | tatttgtata cacatttttt gagacagggt cacaaaaccg |
| | ttaacacatt attattatta |
| 73261 | ttattattat tattatttca cattatttag ggaagtttca |
| | tttttttgtg agctatcact |
| 73321 | gataatttct tatttactca tcatcttgta tttctcttcc |
| | ttgcacattg gggaaatgtc |
| 73381 | tattctagtt tttaatgtaa atgttcttgt ggctttttta |
| | gaaaaaatca aaatgtgcac |
| 73441 | attaaaaagt ttgaatggtt caaaaggtcc taaaaagggt |
| | ccacagtgga aaaggctctc |
| 73501 | ctttcccagc aggcccagat ccctcctcag acacaagcct |
| | gtcgtcagtt tcctgtgtag |
| 73561 | cttcccagag ttggtcacta tgtatgcaaa tacacacaca |
| | tttaaaatat acacactcca |
| 73621 | cgtccacgtg gaatgatgca aagcatctaa gtgcccgtta |
| | attcacaacc ttgccaactc |
| 73681 | agtaatatcc ttgcgaatct aatagctaga aaatggtgta |
| | tctttttagt tctaatgtat |
| 73741 | tatatttatt ctattttctg tgagcttgaa catcttttca |
| | tatatttaaa agtcattggg |
| 73801 | gccaggggtg gtggctcatg cctgtaaccc cagcactttg |
| | ggaggccgag gcaggtagat |
| 73861 | cacctgaggt cagaagttcg agaccagcct ggtcaacatg |
| | gtgaaactca gtctctatta |
| 73921 | aaaatacaaa aaaaaaaaat taatcaggca tggtggctcg |
| | tgcctgtaat cccagctatt |
| 73981 | gggaggctga ggcagaagaa ttgcttgaac tggggaggtg |
| | gaagttgcag tgagtggaga |
| 74041 | tcgtgccact gtactccagc ctgggcaaca gagtgagact |
| | ctgtctcaaa aaaaaatttt |
| 74101 | taaatgtcat tggtgtttcc cttttttgta aaccttttat |
| | gttctttgcc tagttttcta |
| 74161 | tgaggtcatt ggctttttca gtgttggttt ttagtaactc |
| | tcgatttatt aaaacattta |
| 74221 | tacatttata gctttgttta tgatgtatac atttataacc |
| | ttgtctgtga tgcagatatt |
| 74281 | tttccaattt gtcatctggc ttttgacctt atctgtggta |
| | ttctttgaca atacaaaaat |
| 74341 | tttaatttat atctgatcag tttcatccag ttgttttttt |
| | cttttttcat gatttctgag |
| 74401 | ttttgtgtca tgcttagcaa gatgctctct actctgaaat |
| | tattttctgt aaaatatttt |
| 74461 | tttcagccag gcatagtggc tcacacctgc aatcccagaa |
| | ctttgggagg tagaggtgga |
| 74521 | aggattattt gagtccagga gttcaaggcc agcctgggca |
| | acagagcaag accccgcctc |
| 74581 | tattttttaa aagagaaatt tttttaaaat actttttccc |
| | atgttttgtt tgagcactta |
| 74641 | cattttctta acttttttgt cgtgaaacat aacacataga |
| | aaaatgtaat gtaagtgtac |
| 74701 | aacttcatga attgttataa attgaacata tagctttctg |
| | gtactttcat ggtttaactt |
| 74761 | cttacattta aattttggtt tcatctagac tttattttga |
| | tataattgtg aaatagaaat |
| 74821 | ccatttttat tctaaaagaa cactttttaa atgttcatga |
| | aatgttttaa aatttattat |
| 74881 | ataccaagca agaaaaaatc tcaacatagt cctcaaagca |
| | gaaattgcac aggacttatt |
| 74941 | ctttgtacag tgtaatgcac aaaaactaat aagaaagcct |
| | taaaaacaac cctttattaa |
| 75001 | attactccat tccaaattat aatttcaatc tacttagcac |
| | ataagtattg atatacattt |
| 75061 | atcgaaattg gccaaaagtg ttttattatt ttttaaaaga |
| | aaaagcctag caatggctta |
| 75121 | agcaataaag tttttaattt taaagaataa caaacagcct |
| | cactaaatca gaggaaagaa |
| 75181 | ataaaaagat aaaagcaaaa attacagaac tagaaaaggg |
| | accattccag caaaattgat |
| 75241 | aaatgaaaac aaaaatttgt ttttcaaaca taagagttac |
| | caacggctgg tgaatctaaa |
| 75301 | aagaagaaaa aacaaagtaa actaaattaa atgtgaagcc |
| | atgaagagat ttaaaattat |
| 75361 | aagaaaatag gccgtgcacg gtggctcacg cctgtaatcc |
| | cagcactttg ggaggccgag |
| 75421 | gtgggtggat catgaggtca ggagcttgag acccgcctgg |
| | ccaacatggt gaaaccccgt |
| 75481 | ctctaccaaa aatacaaaaa ttagctggct gtggtagcat |
| | gagcctgtag tcccagctac |
| 75541 | ttaggaggct gaggcgggag aatcacttga acccaagagg |
| | tggaggttgc agtgagccga |
| 75601 | gaccttgcca ttgctctcca gcctgggtgg cagagtgaga |
| | ttccgtctca aaaaataaat |
| 75661 | aaataaataa agctgggcgc agtggctcat gcctctaatc |
| | acagcacttt gggaggccga |
| 75721 | ggtgggcgga tcacaaggtt aggagatcga gaccatcctg |
| | gctgacatgg tgaaaccccg |
| 75781 | tctctactaa aaatacaaaa aatgagctgg gcatggtggc |
| | gtgtgcctgt ggtcccagct |
| 75841 | actcgggagg ctgaggaaag agaatggcgt gaacctggga |
| | ggtggaggtt gcagtgagct |
| 75901 | gagatcacgc cactgcactc cagcctgggc gacagagtga |
| | gactccattt caaaaaaaaa |
| 75961 | aatacaagaa catattatat acaactgtga gctacaccat |
| | gtttgaacat cttgacaaaa |
| 76021 | tgagcaactt tctcaaaact aaattgccaa atgttcattt |
| | ttaaaaagcc aaaaataacc |
| 76081 | aaccaacaca atgaggataa atttaaagtg atcaagtttg |
| | atttttttaa aaaactgttc |
| 76141 | aaacatcttg gtagtgctgg gcaggaagtt ggctttcatt |
| | ctgggtgaga tgagaaggct |
| 76201 | ctaaggggca taggacctga tgtcatggga cctgatgcag |
| | gctctgtctt aatagctgac |
| 76261 | tcctgcgtgg agtaggttat tgggggatgg gtggacagag |
| | accagggagg aggctggtgc |
| 76321 | aggaatccca gtgagaaatg atggtgtcca ggctaggcca |
| | tagcagtaga ggaagcaaga |
| 76381 | ttctggaatg cacttggaaa atgaagccat ctttgggctt |
| | gagctcaagg aagcatgaag |
| 76441 | ctgcccctaa ctgaagtggg gaaggtggtc tggggagcag |
| | tttaggagga gagatcagga |
| 76501 | gctcagtttc ggacttggaa attttgaaac gcacatgagg |
| | catccaggtg gagttgggag |
| 76561 | aattaaataa tgctgaaagg tactcacttg gcaagtagca |
| | aatattcgct atattgtctg |
| 76621 | ttcaactttg tcaactgctt ttccagtaga aatgtagtgt |
| | ccttatcaca catgcataaa |
| 76681 | tgttaaactc aaaagtaaaa tgaaatattt tctcagtaga |
| | tatgaataac tttttaattt |
| 76741 | ttttgttttt tgacatgcgg tctcactctg ttgcccaggc |
| | tggagtgggg tggcgagatc |
| 76801 | atagctcact gcagcctcaa actcctgggc tcaagcaatc |
| | ctctgccaca gcctcccgat |
| 76861 | tagctgggac tacaggcaca caccaccacg cccagctaat |
| | cttttatttt ttgtagagac |
| 76921 | tgagttgcac aatgtagccc aagctggtct ccaactcctg |
| | agctcaagct atcctcccac |
| 76981 | ctcggcctcc caaagtgttg ggattacagg cgtgagccac |
| | tgcacctggc tgctttttaa |
| 77041 | ttgtaatatt catcctccat ccatcatact tagtgcaaat |
| | atttttcccc acctattgcc |
| 77101 | ttcctatttc tcttttattt cacgtcattt agggaagttt |
| | catttttttg tgagctatca |
| 77161 | ctgataattt cttatttact catcatcttg tatttctctt |
| | ccttacacat tggggaaatg |
| 77221 | tctattctag tttttaatgt aaatgttctt gtggcttttt |
| | ttaaaaaaaa atcaaaatgt |
| 77281 | gcacattaaa aagtttgaat ggttcaaagg gtcctaaaaa |
| | gggtccacag tgggaaaggc |
| 77341 | tctcctgtcc cagcaggccc agacccctcc tcagacacaa |
| | gcctgtcatc agtttcctgt |
| 77401 | gtagcttccc agagttggtc tctatgtatg caaatacaca |
| | cacatttaaa atatacacat |
| 77461 | gccacagctt tttaaaattt gaatttatgg gccatgtgca |
| | gtggctcacg cctgtaaccc |
| 77521 | caacactttg ggaggccgag gcaggtggat cacctgaggt |
| | caggagttcg agaccaacct |
| 77581 | gaccaatatg gtgaaacccc gtctctacta aaaatacaaa |
| | aattagctgg gcatggtggt |
| 77641 | gggtgcctat aatcccagct tctcaggagg ttgagacagg |
| | agaatcgctt ggacccagga |
| 77701 | ggcagaggtt gcagtgagct gagatcgtgc cactacactc |
| | aagtctaggc gacagaggga |
| 77761 | gactccgtct caaaaaaaaa aaaaaaaatt gaatttagac |
| | tcaggtgcag aggctcacgc |
| 77821 | ctgtaatccc agcacttacg gaggctgatg aggggagaat |
| | cacttgagtc cagtagttca |
| 77881 | agaccagcct gggcaacaca gggaaactat gtctctacaa |
| | aaaaattaaa attagcctgg |
| 77941 | catggtggag tgtgcctgtt gtctcaccta ctcaggaggg |
| | tgaggcaggg gaatcacttg |
| 78001 | aactcaggag taggaggctg catgagctat gattgcacca |
| | ctgcactcca gcctgggtga |
| 78061 | cagagcaaga ccctgtgtca aaaaaaaaaa aaaagaaaag |
| | aaaattagac taccatcata |
| 78121 | gatggtacaa acacttccca gtttgttgct ttcgttttgt |
| | ttgttgccat ttttactata |
| 78181 | cagaaaaaaa aggcaataaa gaatacatta ttataatatg |
| | ttaatttcta ctgcattatt |
| 78241 | tttaacaact tcattgaggt gtaatttaca taccgtaaaa |
| | tctatccatt ttaggtgtag |
| 78301 | gattcagtga tttctggtaa atttactgag ttatgtgacc |
| | atcaccacaa tctggttttg |
| 78361 | ggacattttc attactgcca taatattcct caaacccatt |
| | tagaatcatt cctatttctg |
| 78421 | ctcccaggcc caggcaacca gtaatctact tgctgtttca |
| | atagatttgc cttttctgga |
| 78481 | tgttttacat aaatagaatc atacaatacg tgatctttag |
| | tgatcttttt tcacatggca |
| 78541 | taaacttggt tcctttttat gttgaataat attccattgt |
| | atagatatgt cacagtttgt |
| 78601 | ttctccattc atgagctttt gggtatttgg gttgatttca |
| | ctttttgact gttatggata |
| 78661 | atgctggtac aaacattcat atacaagttt ttgtgtagat |
| | gtatattttc atttctcttg |
| 78721 | gaatagacct aggcgtggaa ttgctggatt agatggtaat |
| | tctattgttt tacattctaa |
| 78781 | ggcaggggtc cccaaccccc aggctacaga tcagtgtcgg |
| | ttcatggcct gttaggaact |
| 78841 | gggccgcaca gcaggtggtg agcggccatc gggcgagtat |
| | tactgcctga gctctgcctc |
| 78901 | ctgtcggatc agcggtgcca ttagattctc ataggagcac |
| | aaacccagtt gtgaaatgcg |
| 78961 | catgtgaggg atctaggttg cgagtttctg atgagaatct |
| | aatgataaat gtaatgagct |
| 79021 | tgaatcatcc cgaatccatc ccccaacccc aacccccgtc |
| | cggggaaaaa atgatctctc |
| 79081 | atgaaatcag tccctaggcc aaaaagtctg gggactgctg |
| | ttctaaggaa ctgccaaaac |
| 79141 | tgccaaactg tttttcagag tggctggacc attttacatt |
| | cccaccggca atatatacgg |
| 79201 | tgtcctgttt ctttacatcc tcatcaacat gtgtcttttt |
| | cattacagcc attctatgtg |
| 79261 | ggtgtgaaat gctatgtggc tgtgtttttc atttccatgc |
| | agaaattttt aatttaattg |
| 79321 | cttagttaaa aataattctt taaatttaaa acactcatat |
| | tgccatatgt atatttttat |
| 79381 | actacaaagt gatacaattt ttgttaattt tcttgccttg |
| | attactcttt acctgtatag |
| 79441 | tatttaaatc tttacataag atcacaatta tagtgaatag |
| | taatttattc aactcaaaat |
| 79501 | cttcatagga tttagaaaat ttaagtcctt taccaaaggg |
| | attgacttYt aacttcatta |
| 79561 | aaggttgcga acagtatcaa atccttggta aagccacatt |
| | caatctttgg cactccagga |
| 79621 | ttttgagcta taactgtagt gatcactaat atgtcatttc |
| | taagctgacg gtcataatga |
| 79681 | ctaaaacctc tcatagattt taaaatactt ccttcaaagt |
| | cagtaaacat tccaagttac |
| 79741 | taagctgttg aacaatttct tattttgaag attttttctg |
| | ataagttcca aagtgtttct |
| 79801 | gatgaaggaa ataaaagctg tccagagaaa tctgagtcat |
| | tgaggtgagc acagattcca |
| 79861 | ttggctgctt gtgctttcat cattacagta caattaactt |
| | cagaagtcga gagatgctgc |
| 79921 | agaattttaa gtacccaaag tttctcaaca agttgatttt |
| | caagcaaggt cattaactgg |
| 79981 | gccattgttt ttgccaatcc tccaacttca gccatttgaa |
| | tcttgtatga tgaactcact |
| 80041 | tgctggtaac ctggaatatg ctcctttggt ggttgtgcct |
| | gataaaagtc aacaatacgt |
| 80101 | ttacaatttt ttatcctcaa ttcagaactt ggtattttca |
| | ttaagtcacc cagaagcgca |
| 80161 | actgaactag cagtatctcc agcataagtt atttcatccg |
| | atactttctt tttcaaaaat |
| 80221 | ggcaagccac actattttat gatatcatat gcagattcta |
| | caaaatgcgg ctggttttca |
| 80281 | atttttactg cacacagatt cagaatttca aatgtctgta |
| | ctaaatccct taagggaagt |
| 80341 | tcattctgat aacactgtac cagtttcttg acagatttaa |
| | gttgcttttc ttctaagcct |
| 80401 | tctttagcag tctcttcaaa aagtttgatg acaccattaa |
| | ggtccacagg cttcaaaaca |
| 80461 | ccagttccac atggcgaggg aggccttggg aaacatcatc |
| | atgatggaag gcaaagggga |
| 80521 | agtaaagacc ttcttcatgg tggcaggaaa gagacagcat |
| | attgctatgt attttaacac |
| 80581 | cacttatttc cccccttttt tctttcaata tcatggatta |
| | aatagtgtat tttaaatgag |
| 80641 | tgtgaggctc acttggactc tattccatcc ctttggccaa |
| | tttttttcca tttttaatcc |
| 80701 | aagaatctta aagtttgaat gatsgtcacc ttgttatata |
| | ttttattatg tttggaagct |
| 80761 | tttttgctat tgtctgatcc tcccaacaaa tagccttttg |
| | atagaattgc ctttattcgt |
| 80821 | ttctttatat ctaattctaa cttaagatta gacttaaaag |
| | taacttcagc ggttttatta |
| 80881 | tgaaatattt aaggcatata aatactgcct cttttctcta |
| | aatgactgct aatataattt |
| 80941 | taccaagttc tgttaaagta tcctgttgta cataaagtgc |
| | tgttgttttt tatctgcctg |
| 81001 | ttaacttaga gtgggtttta ttttctttca ctttctgtgg |
| | tcgaaggcaa gtatgtctta |
| 81061 | gtcagtttgg gctgttataa tgaaacactg tagactgggt |
| | ggcttaaaca acagaaactt |
| 81121 | gtttctcacg ttctgaaagc cgggaagtcc ccaatcaggg |
| | agccagcagg cctggtgtct |
| 81181 | ggagaggatg cgcttcctgg tttgcagacg gcaccttctc |
| | attgtgtcct cacagggcag |
| 81241 | agagcaaaaa gaaagggcaa gcgctctcca gcctcttcct |
| | ttttcctttt tttttttgtt |
| 81301 | tgtttgagat ggagtcttgc tctgttgccc agactggagt |
| | gcggtggcat gatcttggct |
| 81361 | caatgcaacc tctgcctcct ggcttcaagt gattctcctg |
| | cctcagcctc ctgagtagct |
| 81421 | gggactacag gtgcctgcca ccatgcctga ctaattttta |
| | tgtttttatt agagatgggg |
| 81481 | tttcatcatg ttggccagac tggttttaga ctcctgacct |
| | caagtgatct acctaccttg |
| 81541 | gcctcccaaa gtgctgggat tacaggcgtg aaccaccgca |
| | cccggcctcc agcctcttct |
| 81601 | tgtgagggca gtaatcccat cataaggggt ccaccctctt |
| | gacctaatca cttcgcaaag |
| 81661 | gtcccacttc caaataccat cacactgggt atttaggctt |
| | caccaggtga attggtgggg |
| 81721 | gaggtgggac acaaacattc agtccacggc aagtttttat |
| | ctcaatttgc taaagcctct |
| 81781 | ctttatttct cctgttacag tgtgataatg ttttttaaaa |
| | tatcatttag ctggctgtgg |
| 81841 | tgacccatgc ctgcagtccc agctactcag gaggctaagg |
| | caaaaggatc acatgaacct |
| 81901 | aggagtttga atccagcctg ggcaacatag aaagaccctg |
| | tctcttaaaa aaataaataa |
| 81961 | ataaataaat aaataaataa ataaataaat aaataaagga |
| | aagaggctgg gcacagtggc |
| 82021 | tcatgcctat aatcccagca ctttgggagg ccgaggcggg |
| | cagatcacct gaagtcggga |
| 82081 | gttcaagacc agcctgacca acatggagaa accccttctc |
| | tactaaaaat acaaaattag |
| 82141 | ccgggtgtag tggcacatgc ctgtaatccc actacttggg |
| | aggctgaggc aagagaattg |
| 82201 | cttgaaccag aaggtggagg ttgtggtgag ccgagatcat |
| | gccattgcac tccagcctgg |
| 82261 | gcaacaagaa Igaaactcca tctcaaaaaa aaaaaaaaaa |
| | aaaaaaagaa agaaaagaaa |
| 82321 | agaagcactt aaagaggctg aggcaggcag atcacttgaa |
| | gtcaggagtt caagaccagc |
| 82381 | ctggccaaca tggtgaaacc tagtctctac taaaaatact |
| | agaattagcc agacgtggtg |
| 82441 | gcacatgcct gtaatcccag ctactcggga ggctgaggca |
| | tgagacttgc ttgaacctag |
| 82501 | gaggtggagg ttgcagtgag ctgagaacat gccattgcac |
| | tccagcctgg gcaacagagc |
| 82561 | aagactccat ctcaagaaaa aagaaagaga gagaaagaga |
| | aatatagaca tatgttatta |
| 82621 | gtcccccagg acctcttcaa aagatctctc ttttcctttc |
| | ttatttctaa ttaccatact |
| 82681 | acataccaca tccattatgt cagaatgtgc cctatttacg |
| | tggatttgtc taaagtcatg |
| 82741 | gaactctgag ttacattccY cgtatttcac agagacacaa |
| | tcagagcaca cgctgatctt |
| 82801 | ccgcctctct tcatttcctc catgtactct gtagctacct |
| | gttctcttct ttgttcgtag |
| 82861 | gaagatctct gttgcgtggt gtgggagttt gtgccagctc |
| | atctttttat tgtgctttct |
| 82921 | gtgagcagct atcaatgcct ccaggtcttc tctttaagaa |
| | gaatgtttac tctcaattgt |
| 82981 | ttaaaaaact aactaaatag gaagaagatt gcaaatccta |
| | acctttttgg ggttttatat |
| 83041 | tgggggcaaa agttggcatc tgcagtaagg attatttcat |
| | tttcatctga ataaatgagc |
| 83101 | agtaataact ttgctgactt gcagggctca ttgtgatgcc |
| | aaaggacatt gtaaggtgca |
| 83161 | tatctgaatt ggaggaggaa gaggggcatc ctctgagcca |
| | ggtgtggcag gaggtgacat |
| 83221 | caaggagggt taggctgcgt aaacccaggg acacaaggag |
| | ctgcagtcgg ggaagaacaa |
| 83281 | ggtctagcgg atggagttgg ggggactgtg tctggagcca |
| | atgttctcag atgtgtctcc |
| 83341 | ggcaggcagg ggcaagggct ggtgcctggt ttacagcatt |
| | ccttttggag tctggaatag |
| 83401 | tggggaaaac tccctgtctt ctctcccctt aggagtctgc |
| | actatggaaa caacctgtca |
| 83461 | atccagctca aggcacacat agcccagaca cccatgagac |
| | cctctccgtg gggaccctag |
| 83521 | agcacctatc atgaacgagg agaccaagta ggtgattttt |
| | ctctcccctt cacctcctct |
| 83581 | tttcccctcc tatctacttc gtcacttttc tcctactgcc |
| | aagactggtc cctacccaaa |
| 83641 | tctgccttac tgggctgccc ccaacacaac aaacctgccc |
| | ttgaccatca ttcagcatga |
| 83701 | gaatgtaatg atcagacaca gaaaatcagg aagagttttg |
| | agacagcatc taatctaccc |
| 83761 | attttagaga tggtatgact gaggcttata taggaaaaag |
| | gcttgctcaa ggtcacacta |
| 83821 | tgagtgtatc agctaggata ggccaggtta cactgtagta |
| | catgcaccct ccaaagtccc |
| 83881 | agtgactcat ggcaacaaaa gtttatttcc tgctcttgct |
| | tcctgtctcg tgtggattga |
| 83941 | ctgggattgc tcctccacat catcctgtct cccacactca |
| | ggctaacagg gtagccatga |
| 84001 | tttgcaatat ttctggtccc tggagtagaa aaaaagaaaa |
| | agtactgtca attacacctt |
| 84061 | ggttcttaaa acaactacag gcatgacatg agtctttttt |
| | agcatgtttc attgaccaaa |
| 84121 | gcaagtttca tggctgtgcc caatttcaag gaggcagaga |
| | agtgtaatcc caccaaaggc |
| 84181 | ctagaaagag gagaaagagt atctgtgaac agccctaatg |
| | cctaccacag agaattagta |
| 84241 | acagagctgg gccatggatc tttcaaccat cgtcctctgt |
| | ctccaagatt attccccatg |
| 84301 | gaaatctcaa tgactgataa tgatgccatg tgctttttct |
| | cctgaggatg gttagcctta |
| 84361 | aagagatttg tgtcatatcc taaggggata gaacactaat |
| | gatggaaaca aaggtattgt |
| 84421 | gttagactgg ctggaggaga aatttgagga tgagaaacat |
| | caccagaaat cacaccatcc |
| 84481 | agycactact tacttccatc tggtgccatg ctgccctgga |
| | ccatttcttc atgggtagca |
| 84541 | tggatgctgg acaccatagc ctggaaaaga agttatgccc |
| | taggctatgg ccacatcctt |
| 84601 | ttgccgagat cacacaaaat ccagggactt agccttgtct |
| | ggtgccatct aggcctccaa |
| 84661 | ggccttggaa atttactggc ctgggaggca agaaacctca |
| | gttctcctcc tgcctctgtc |
| 84721 | atsgacttgc tgtgtgactg tgggcacacc ctttgccctt |
| | ccttggccat ggtctttccg |
| 84781 | tctgcttagt ggaggtggtg atccctgcct gaggatcatg |
| | gtgtgagcat gtttcataaa |
| 84841 | ttctaagact ctctgcctga gtgaggacct attgctatta |
| | gcccagttga ggagaaatga |
| 84901 | ccagtggggc tgacagtaca tccaagtatg tctctactgc |
| | atgcccaggg agcagctggg |
| 84961 | ctctaaaccc caggacgcat agtactggcc tcagcctctg |
| | ggaattggga aggctggctt |
| 85021 | ctgggtggac ctcctactct tttcagagtt agaggtggac |
| | tctctggagt tgtgaggata |
| 85081 | aaataaggta tataaagcac ttagacagtg cctaatacac |
| | agtgagtgct ttccaagtgt |
| 85141 | gtactgctat gaggaaggac atagtaccag aaagtacatc |
| | cggaaatgtg atagcatagt |
| 85201 | ccactagatg atggaccacc atttagttgg ccaatcccca |
| | actgttggac atttaggttg |
| 85261 | tttccaattt ttaataatta taaataatct tgcagtgagc |
| | atctttgcaa ttaaatattg |
| 85321 | tatatacgtt catgatcgtt tgccaaggtt agagtcctag |
| | aaatggaatt actgaatcaa |
| 85381 | aggaactgca cattatttag gcttttgctg tgtaaatgcc |
| | ccgtgccctc tattggtact |
| 85441 | tctagaagga ggtggtttaa gagttccagt tcggccatca |
| | tgatggctca cacctgtaat |
| 85501 | cccagcactt tgggaggccg aggtgggcag atcaccctga |
| | ggtcaggagt ttgagcccag |
| 85561 | cctggccaac atggtgaaac cccatctgta ctaaaaatta |
| | caaaaattag ctgggcattg |
| 85621 | tggtgtgcac ctgtaatccc agctactcgg gaggctgagg |
| | cagaagaatc gcttgaaccc |
| 85681 | gggaggcgga ggctgcagtg agccgagatt gcaccattgc |
| | actccagcct gggtgacaga |
| 85741 | gcgagactct gtctcaaaaa aaaaagagtt ccagttcaga |
| | agggaagaat ttgcttagca |
| 85801 | aaagaggtga tggtctgtgt tagctaggat tagagttcac |
| | tgtgagtagc agaaagcact |
| 85861 | aaacaacagt ggcttaacca gaatggaagt gtatttccct |
| | gccatgtaac agaagtccaa |
| 85921 | agtcagtgag cacagggcag atgggcagct ttaccttcca |
| | ccttcctcag tatgggttcc |
| 85981 | acctcatgat tcaatatggc tgcccaagat ccagccatcc |
| | catcaacaat ccagacaaca |
| 86041 | ggaaggagca aagaagaata gacaacattt ctacttacat |
| | tccactggcc aaattacatg |
| 86101 | gctacatata actgcaaggg agactgggat ataataatct |
| | attctagatg accagagaat |
| 86161 | atttagtagt tctaatactg aggaagaagg gaagaacaga |
| | ttttgggaga caactagttg |
| 86221 | tctctgccat gaggttagct cagactgaga gcagcataaa |
| | tggttcatgg aaataagaat |
| 86281 | gagtaatgca tcctcacggg actgtccaca ggggatgaac |
| | aagaccattc cagagagcca |
| 86341 | gggtgcaggc acaaatggag tagggagggg gtgcagaaga |
| | aacagactga tctctggagc |
| 86401 | tgatccctgg gcagagacat caagactcca tggagaggcc |
| | acttccctgc ctattttatg |
| 86461 | tcKctcaaat gtagggactg gttcttgact gcttgacttc |
| | cctagaaact cccttatccc |
| 86521 | ccaactcacc ttScccagat caccttcccc ctagttcatc |
| | tgtaccccac tcacctgccc |
| 86581 | tcaggtcacc tgccccacaa ctcacctgtt ctccatctaa |
| | tcttcctccc agctcccctg |
| 86641 | tcccccaaat cacctgcccc caatttgctt gtcctccagc |
| | tcaccggttc cccagctcat |
| 86701 | cttccttcca gttcccctgt cccccagctc acctgcctgc |
| | cctcagttca cctgtccccc |
| 86761 | agttcatctt cctcctagct cccctgtccc ctagctcacc |
| | tgtgccccag ctcccctgtc |
| 86821 | ccccagttcc cctgtccccc agctcacctc cccctcagct |
| | ctcctgtccc ccagctcatc |
| 86881 | tgcccccagt ttacctgtcc cctagctcac ctccccccca |
| | gtttacctgt cccccagctc |
| 86941 | acctcccccc agtttgcctg tcccccagct caactccccc |
| | caagttcccc tgtccctcag |
| 87001 | ctcatctgcc cccagtttRc ctgtccccct caactcacct |
| | atcttccctg tccctccagg |
| 87061 | gctggctcct catggacccc gttggcctcc agctcggcaa |
| | caagaacctg tggagctgtc |
| 87121 | ttgtgaggct gctcaccaaa gacccagaat ggctgaacgc |
| | caagatgaag ttcttcctcc |
| 87181 | ccaacacgga cctggattcc aggaacgaga ccttggaccc |
| | tgaacagaga gtcatcctgc |
| 87241 | aactcaacaa gctgcatgtc cagggttcgg acacctggca |
| | gtctttcatt cattgtgtgt |
| 87301 | gcatgcagct ggaggtgcct ctggacctgg aggtgctgct |
| | gctgagtact tttggctatg |
| 87361 | atgatggtaa gggcaggtgt gagagacgca aagcagccgg |
| | gccagtacct gcgtcatggg |
| 87421 | gagccgggag gagcccaggg acccacctaa gtcagagaga |
| | gggtgtagcc cagccacgat |
| 87481 | ctcaactcta tatttctgga cacttcccag aacaaatttc |
| | ctaatgcgcc caaatctgct |
| 87541 | ggggcctgga ggacccctcc ttctacctgg cttcactcga |
| | attgctcgaa ttgctgagtg |
| 87601 | actgcttcca gccacaaaat cccacatagc ccataatgcc |
| | cgagagattt atttcttctt |
| 87661 | ttttggcggg ggtggggggg tgttttttgt ttgttgttgc |
| | tcttgttggg ttttgtttgt |
| 87721 | ttgtttttta tttttgagac aaggtcttgc tctgttgcct |
| | aggctggagt gcagtggcac |
| 87781 | aatcatagct cactacagca tccaactcca ggactcaggt |
| | gatccttccc acttcagcct |
| 87841 | cccaagtagc tgagactaca gtagaactat aggtgcatgc |
| | caccacatta ggctaatttt |
| 87901 | tcattctttt gtagagacag gacatcactg tgttgcccag |
| | gctggtcttg aactcctggc |
| 87961 | cttaagtgat cctcctccct tggcctccca aagtgctggg |
| | attatagatg tgagccatca |
| 88021 | cacctggcta gaggtgtttt tgtttgtttg tttgttttgc |
| | aacatggtca gaaacagtga |
| 88081 | cggggagcgc cttctgccct ctactgatcc gtggggattt |
| | cttgggcacc ttctgtttgc |
| 88141 | acagcactga ggggaaacac aggacattga ggggcaacag |
| | cgtttttgga gagaaaatgg |
| 88201 | gaactcactt aagaacccta cttcaaggca gagtgtggga |
| | attgcggggg gcggggcggc |
| 88261 | gcatgcacat atgtgcagac atatgcagat acacacagtg |
| | catatacatg tgggtatgtg |
| 88321 | cgtaaaccca tgtacacatg catgcaagtg tgcccacatg |
| | cataacacat gcatgcctgt |
| 88381 | gcacacacat acataaactt gcatgcactt gcatatacac |
| | acatttctgc ccagcactgc |
| 88441 | cttcaaagct caccaccaca ttttctccac aacagataac |
| | tgagtgttcc atttagttct |
| 88501 | cccttgctgg gtatctccct gtgagatgag ccctgagcca |
| | ggcgccaggc cagagctggt |
| 88561 | ccccagcatc cctcgacagc cccataccac attatactct |
| | cccctctctt gcagggttca |
| 88621 | ccagccagct gggagctgag gggaaaagcc aacctgaatc |
| | tcagctccac catggtgagg |
| 88681 | actggagttg gggggtggga agggggtggt gagcactgtg |
| | aagtccccac ttccaagctg |
| 88741 | gaggaggctg tggaggctgt ggtggctggt cacagccatt |
| | tctcataggc catgctcttc |
| 88801 | gtctgtccct gacccatttg caagtgtgtc aagcccctaa |
| | ctgtgtctcc cagccccacc |
| 88861 | tcctcctgca gtgactttca aggctttagc ttgtcccgtt |
| | accaattctM aagggtctaa |
| 88921 | cctggaaccc ctcaggaagc ctgttctcac tttaYtgccc |
| | gcaacccgca gggcctcatc |
| 88981 | tcccagcccc aaagtgtcag gcttcatggg gaagccctaa |
| | Ycaccccctc ccgacttgta |
| 89041 | caccttggac ttgacRctca cccacagctg ctgtcttcag |
| | cgggggagcc tttggctgat |
| 89101 | tttctgaagg agctcggaag ggccagtgat taaataatga |
| | ccacctactg attcgtgggt |
| 89161 | cacactttca tctcagcacc ttgatttcta cagaagcatt |
| | gactttactt atcgctgtgc |
| 89221 | atggcagtaa tgccaacaga aaacccaccc tataacctca |
| | gctccccagt gaatcaaaac |
| 89281 | tgtccaagtc cctggtccaa taggcccgca tcactgagct |
| | ggcatcatta tctcatggct |
| 89341 | gtaaccagat ctgattgata tttggccagt gagtcccttt |
| | ttaatatagg atttgttaag |
| 89401 | atattgaagt gctctcgaac tggttccagc ctcctagctg |
| | gacaaggagc ccagggccct |
| 89461 | gctccagggg ctgttcctat tggtcactta gcttagctgt |
| | aggaggaccc tgcttgactt |
| 89521 | cttaaaattc tttcctgagt cctctttcct ttctccctcc |
| | cttcctttct gggtcccctt |
| 89581 | ccttcttgtt ttccttcttc ctttctcaaa ctcttccaga |
| | aaggcattaa agtgattgtt |
| 89641 | gaaaatccat acaatgagac aagactccag aaactattaa |
| | gggaagtgag gaaatgtggg |
| 89701 | tgataagaaa tcgggatgat aaaaccctaa cagaggaggg |
| | aggttgcagg cctggccaaa |
| 89761 | ctcactggga acttcactta tatgaccacc ggcggcttcc |
| | atagagcttg gtccttccct |
| 89821 | gatggacaga tggccattta gtgcttggag ctgagtgttt |
| | ctRggggctg ctggctgtYg |
| 89881 | gccctgcttc ctgcatcctg gactgcaaga ctgccaggcc |
| | cagaacatcc accttccaat |
| 89941 | gggggtgcct agaagtccac tctgcaaata gaagctggtg |
| | ttgacccagc ctctgcctgc |
| 90001 | tgcctgcctt tccagtccct gcatgtgggt gtacttggct |
| | gcctgccacc tgtctgtgga |
| 90061 | ctggaKttcc ccaaaggttc tgggtaaccc ctcagcccag |
| | Rtccccagac cccactcctc |
| 90121 | caccccttcc tttgcttttt caggcctgaa gcgcccacat |
| | cagagctgtg ggtcctcacc |
| 90181 | ccgccggaag cagtgcaaga agcagcagct aggtgggtac |
| | cagtgtgggg aggaacataa |
| 90241 | acagagagat ggggttgcct gggggccaag acccggaccc |
| | tggaccttgt cccctgccaa |
| 90301 | taagcctcca gaggcccagt gactcttgtc tcgcaagttt |
| | ccaggagaaa aggactggag |
| 90361 | gtcttgcaca ggcagaggag aggcctgggc tggcagcgaa |
| | ggggctcccc acccatctgg |
| 90421 | ctgcatgggg acttctctga agagggctcc gctgaaggag |
| | ctggaagcac catacaggtc |
| 90481 | tcagcttcgc tgtccaggct tttccaggga caccctatgt |
| | cctcagtgtt gaaggagacc |
| 90541 | cagggaggag accagtttgg gggtgagcag ggatggggag |
| | gggtgaggag gcctgggaga |
| 90601 | aaccttcaag acagaggccc tgggggccca tggggagaca |
| | tggagctgct tagggcaggc |
| 90661 | caggccagtg agagaagaaa ggggacttct ctcattcttg |
| | accagttctc agaatggtcc |
| 90721 | tcgttctcca cgagttgtcc cactaactag agccttctct |
| | gcccccactg ctgccaacca |
| 90781 | tggctataac cagaggattc acatccgctc aaaatagttc |
| | actaccttgg cctttcccca |
| 90841 | tagggttccc ccaaaagcag ccccagccct ttccctgggt |
| | cacctgagac ctctcaatga |
| 90901 | cccaggaatt aaaaggttaa catctggcac tgtaggggcc |
| | cagctcccac agttccgatc |
| 90961 | ggtaatgcct aggcctacag gttgttagtg ctcacccctg |
| | ggcattgcag aactgaaata |
| 91021 | ttgggaagRg gcactgggga tccagatatt acagaaagag |
| | gttgtttcaa taagatattg |
| 91081 | caaagtagct gggcgcggtg gctcacacct gtaatcccag |
| | cactttggag ggctgaggca |
| 91141 | ggtggatcag ttgagcccag gaattcaata ctagcctggc |
| | caacgtgaca aaaccttgtc |
| 91201 | tctactaaaa atacaaaaat tagctgggtg tggtggtgtg |
| | cacctgtagt cccagctact |
| 91261 | caggaggctg aggcaggagg atcacttgag accaggagtt |
| | tgcggctaca gtaagctagg |
| 91321 | atcgtgccac tgcactggag cctgggcaag actgagactc |
| | tgtctctggg aaaaaagaaa |
| 91381 | aaaaagagat gttgcaaagg aggtgcccta ttcccctccc |
| | cccatcttac tgaMccctta |
| 91441 | caccacgtgt actattgcag aatggataga accgtgaccc |
| | acacttcccc attcccacct |
| 91501 | gcctgtttaa atagctaccg gagagcctat gctcccttag |
| | aactgattcc ttctggaagt |
| 91561 | tggggtggca cagatccccc tatggtgctc ttgacacccc |
| | caccctcacc ccatcataca |
| 91621 | tacacatctg gggctacagg ctcccaacag cccaatactg |
| | gggcaagaag acatgagcag |
| 91681 | agggccgggg ggtcctctcc tcatgccatg tccctgcccc |
| | ttgcagagtt ggccaagaag |
| 91741 | tacctgcagc tcctgcggac ctctgcccag cagcgctaca |
| | ggagccaaat ccctgggtca |
| 91801 | gggcagcccc acgccttcca ccaggtctat gtccctccaa |
| | tcctgcgccg ggccacagca |
| 91861 | tccttagaca ctccggaggg ggccattatg ggggacgtca |
| | aggtggaaga tggtgctgac |
| 91921 | gtgagcatct cggacctctt caacaccagg gttaacaagg |
| | gcccgagggt gaccgtgctt |
| 91981 | ttggggaagg ctggcatggg caagaccacg ctggcccacc |
| | ggctctgcca gaagtgggca |
| 92041 | gagggccatc tgaactgttt ccaggccctg ttcctttttg |
| | aattccgcca gctcaacttg |
| 92101 | atcacgaggt tcctgacacc gtccgagctc ctttttgatc |
| | tgtacctgag ccctgaatcg |
| 92161 | gaccacgaca ctgtcttcca gtacctggag aagaacgctg |
| | accaagtcct gctgatcttt |
| 92221 | gatgggctag atgaggccct ccagcctatg ggtcctgatg |
| | gcccaggccc agtcctcacc |
| 92281 | cttttctccc atctctgcaa tgggaccctc ctgcctggct |
| | gccgggtgat ggctacctcc |
| 92341 | cgtccaggga agctgcctgc ctgcctgcct gcagaggcag |
| | ccatggtcca catgttgggc |
| 92401 | tttgatgggc cacgggtgga agaatatgtg aatcacttct |
| | tcagcgccca gccatcgcgg |
| 92461 | gagggggccc tggtggagtt acagacaaat ggacgtctcc |
| | gaagcctgtg tgcggtgccc |
| 92521 | gcactgtgcc aagtcgcctg tctctgcctc caccatctgc |
| | ttcctgacca cgccccaggc |
| 92581 | cagtctgtgg ccctcctgcc caacatgact cagctctata |
| | tgcagatggt gctcgccctc |
| 92641 | agcccccctg ggcacttgcc cacctcgtcc ctactggacc |
| | tgggggaggt ggccctgagg |
| 92701 | ggcctggaga cagggaaggt tatcttctat gcaaaagata |
| | ttgctccacc cttgatagct |
| 92761 | tttggggcca ctcacagcct gctgacttcc ttctgcgtct |
| | gcacaggccc tgggcaccag |
| 92821 | cagacaggct atgctttcac ccacctcagc ctgcaggagt |
| | ttcttgctgc cctgcacctg |
| 92881 | atggccagcc ccaaggtgaa caaagacaca cttacccagt |
| | atgttaccct ccattcccgc |
| 92941 | tgggtacagc ggaccaaagc tagactgggc ctctcagacc |
| | acctccccac cttcctggcg |
| 93001 | ggcctggcat cctgcacctg ccgccccttc cttagccacc |
| | tggcgcaggg caatgaggac |
| 93061 | tgtgtgggtg ccaagcaggc tgctgtagtg caggtgttga |
| | agaagttggc cacccgcaag |
| 93121 | ctcacagggc caaaggttgt agagctgtgt cactgtgtgg |
| | atgagacaca ggagcctgag |
| 93181 | ctgyccagtc tcaccgcaca aagcctcccc tatcaactgc |
| | ccttccacaa tttcccactg |
| 93241 | acctgcaccg acctggccac cctgaccaac atcctagagc |
| | acayggaggc ccccatccac |
| 93301 | ctggattttg atggctgtcc cctggagccc cactgccctg |
| | aggctctggt aggctgtggg |
| 93361 | cagatagaga atctcaggtg agtaagagtg gaggaggacc |
| | ggggagggga ttgggctttt |
| 93421 | gggggagcag aggccaacca gtctagcaaa cctctgccaa |
| | gaggactgga taagaatctt |
| 93481 | gaatatcaga acataatggc ctgcaatgca agagaggaag |
| | ctccatacct tgacaggacc |
| 93541 | tctggagtcc aaatggatcc tcctcttgtc tgtggtttct |
| | ggactctcag tctctctgtc |
| 93601 | aatcatgggc tgaaaccaca gatccaggct gtctaYagag |
| | gctggtggac tttgggcaag |
| 93661 | tatatggagc acacacatgc acactgtcta ggccagagtt |
| | tcttcgttcc taaaacgaat |
| 93721 | ctgtaacaat agccaactca tatggtcatt gcaagaatga |
| | gatgggatgg tgcatgaaaa |
| 93781 | acattttgta gcacagtgcc tagcacagag caaaggctca |
| | gtgtgcatat tagctagaga |
| 93841 | aaaggctagg ctgcagtaac agagaaacct cctccccaaa |
| | tacagtaggt taaataatgt |
| 93901 | agaattttat ttctctctca tggaagagtc agaggtaggt |
| | ggtccaggtc agtggaatgg |
| 93961 | ctcagctcca cgcagtcatg caggtaccca ggtccctccc |
| | attttgctcc attatcccct |
| 94021 | tgggaatcct atctgcacag tcaaagctac gtcatgggta |
| | tatctgtgct ctggcttggg |
| 94081 | aacaaggaaa gagcatggag gaacatgtaa atgcattaaa |
| | gttcagtcct gaaactagga |
| 94141 | tacatccctt ccactcacat tccattggtg agaacatagt |
| | cacctggcca cactgagctg |
| 94201 | caagggaggc tgggaaatgt gatctctggc tgggaaacca |
| | tgttcctcat gatagctcta |
| 94261 | ttgctgtaga tgaagtggag aatgggcttt ggtggacgat |
| | tagaagtctc ggccataata |
| 94321 | tgtatttgtt agtactactg tattaagccc catctctctg |
| | aggggatggc gatgacttct |
| 94381 | cagctctgcc cagcactgat cctctgacac ttcgcttctt |
| | cttatggcag ctttaagagc |
| 94441 | aggaagtgtg gggatgcctt tgcagaagcc ctctccagga |
| | gcttgccgac aatggggagg |
| 94501 | ctgcagatgc tggggtgagc caggccttgg agctgagaag |
| | ggtcttcagc tggggatgcc |
| 94561 | tggtactctc ctccctctcc ttaatcctac acaaggcaga |
| | ttcctggccc cgcccttttc |
| 94621 | ccctcctcgt tcctccccac catctttgct tactctgtag |
| | gttagcagga agtaaaatca |
| 94681 | ctgcccgagg catcagccac ctggtgaaag ctttgcctct |
| | ctgtccacag ctgaaagaag |
| 94741 | tcaggtgagt gatctccagg agggctcact gactggggag |
| | atgagccact gcccaggtcc |
| 94801 | cagagtcccc ctggggcctg catgttcctc caagtctgac |
| | cagtagtttt tcagtgagac |
| 94861 | ccagagaggg aaggcatcag tccaagtact cagtagggct |
| | gagtccaaac ccaaggctcc |
| 94921 | cagagtcccc agagcaaggc ttccttcatc taatatttta |
| | gactgtcttg gaggagcatg |
| 94981 | agtgttaagg ctccctccct ctttctgaaa tcccaggaga |
| | agggatagca gtgcgtaggc |
| 95041 | aggaatcagg cactgtgggt acacataact acatgaagca |
| | ccacacacct tcacatttgt |
| 95101 | tcacacatgt ctacacttgc acagaagtac acaggcatat |
| | gcaagaatat gcacccacac |
| 95161 | atgcccactc ataggtgtgc acatgtatgc agcgcacaca |
| | tgcaccttta actacatgta |
| 95221 | cacattttga tgccagcaca ctctaactaa ctaagcttgt |
| | atgcacaaat atactcctgc |
| 95281 | cctgtgtctg ggactcagta ccatggggag gagtgggacc |
| | agtgaccctc ctccctggca |
| 95341 | gaacgctgct agtttatatg gcacctttat gacatttaga |
| | gaaggcacca cttcatccac |
| 95401 | acagatgcag cctgtcacta aggttcagca cttgttgagt |
| | gaaaataata agttggacca |
| 95461 | cagtccctat tgtcgtctcg gctgggcatc tgtgaaccgt |
| | gattaagcca aggttcagaa |
| 95521 | gtactgaact tgttgacatt tttcttccct ggctattgaa |
| | agtgacttta attttgtctt |
| 95581 | tcatcaccca ccattgttct taatcaccct cactcccctc |
| | aactcatctg tctccccagc |
| 95641 | taggaaccca ggcaaggctg gcttgtgaac aggtggggaa |
| | agtgaggtca gagaggaatg |
| 95701 | cgcttggctc agggctctgg gtgagtcagg gccacagccg |
| | aggctggaag cgatgtctgc |
| 95761 | agcgtcccag tctagacttt actcattgcc tggggggcct |
| | atcccaggca catcccaggc |
| 95821 | ataagccctg ggagcagggt gctaggtctc ctcattgtgc |
| | ctcatgaaga ggccgtcagt |
| 95881 | ctgtcttcta gatcccttga gccgccaggc aaaaacttcc |
| | ccataggaac agaatagacc |
| 95941 | cagaattgag gccagcagag ggtctttcct cctagccgtg |
| | cctgctggaa tccggcgagc |
| 96001 | aggccatcag ctctttctgg gcccctgtct tatgtctccc |
| | acatgagggt ggccatcctg |
| 96061 | tcacttgcta actggggctt gcaagtgccc caaccccagg |
| | gcaaagggac tgggccttgg |
| 96121 | tctcctcgca gttttcggga caaccagctc agtgaccagg |
| | tggtgctgaa cattgtggag |
| 96181 | gttctccctc acctaccacg gctccggaag cttgagtaag |
| | tgatctttcc actgcctctg |
| 96241 | cagcccagtc cctctctata cctgattcac cccactccct |
| | tgcaaggcaa ggaaggtctg |
| 96301 | gggcccctgg ggtaggggat tccactcctg acacctttgc |
| | cacaatcttg cagcctgagc |
| 96361 | agcaacagca tctgcgtgtc aaccctactc tgcttggcaa |
| | gggtggcagt cacgtgtcct |
| 96421 | accgtcagga tgcttcaggc caggtgagca gaaggaaagg |
| | gatcttggcc ttatgggcct |
| 96481 | tgagaaaaga ggaggggaaa gtgggatggg aaatggagga |
| | ggcccctcgt ctgcaggata |
| 96541 | aatctgtgca taccctactg ttttactcac agctttacct |
| | tcagaaccta gctcaggctt |
| 96601 | ggcacctggt acttggtata tattgaatta atggatggat |
| | gaaaagatgg atgtatggat |
| 96661 | ggatggctga aaagatggat gggtggatga aaagatggat |
| | ggatgaatgg atggctgaaa |
| 96721 | agatggatgg gtggatgaaa agatggatgg atggatggat |
| | ggatggatgg ctgaaaagat |
| 96781 | ggatgggtgg atgaaaagat ggatggatgg atggatggat |
| | ggatgaaaag atggatgggt |
| 96841 | ggatgaaaag atggatggat ggatggatgg atggaaagat |
| | tgatgggtgg atgaaaagat |
| 96901 | gaatggatgg atggatagat gaatggatgg atggatagat |
| | ggctagctga aaagatggat |
| 96961 | aggtgtgtga aaagatggat ggatggatgg atggatggat |
| | ggatggatgg atggatggat |
| 97021 | ggatgaagga atgagtcaac aagtctacga agcacaggca |
| | tagccaaagg aataattagc |
| 97081 | tgtgtgttgc cctccatggt gctgaaccaa tatagccagt |
| | tttgatcatg gggtaggtta |
| 97141 | ggtgtcattt ttcttactca taaaaatttc tattaaaaaa |
| | aattcagccg ggctcagtgg |
| 97201 | ctcatgcctg taattccaac actttggaag gccaaggcaa |
| | gaggattact tgagctcagg |
| 97261 | agttcgagac caacctgggc aacatagtct ctacaaaaaa |
| | tgaacaaaat taatggggca |
| 97321 | tggtggtgca tgcctgtggt tccagctatt tgggaggctg |
| | aggtgggaag attgcttgag |
| 97381 | ccgtggaggt tgaggctgca gtgaggtgtg aacacaccac |
| | tgcactccag cctgagtagc |
| 97441 | agagtgagat ctccatctca aatttaaaaa gaaaggaaaa |
| | aaaaaaactc acaacattct |
| 97501 | taatttttat tatatttctt gtgaaaattg tttttctgac |
| | tttttaaaac actcttgcag |
| 97561 | gattcatcaa gcaaagacat aatcagtatt tcacatgcct |
| | gatttaaaac acttttgcta |
| 97621 | gttccgttat gtttccctgt caattgcaaa atcagcttta |
| | tctggatgtt tgaacatttg |
| 97681 | gggcagaaaa gggtgtgcct gtggtgggtg atgtgctggt |
| | ttccagtctc tgggtttcat |
| 97741 | ggcttggtat ctgatcctgc agggaggcgg acctcatctt |
| | ccttctttcc ccgcccacag |
| 97801 | agacaactgc agagctacaa aggtaagaag ccaagaggcg |
| | gtgggcctgg ggccatcctt |
| 97861 | agaagcaact tgggctcagg cagttgaggg gaaaggtgac |
| | caagagacta ggaagagctg |
| 97921 | gggtatggga attcttcctg ctactgctgc actgaggaat |
| | gaattactgc ttaggttggc |
| 97981 | aaaggatttt aacttcctct agYgtgtcca gaccacatct |
| | ggtccctgtg gaaggaagca |
| 98041 | tccccagaag actcagagga aggcaaaccc ttggggagaa |
| | cataaagata ctgttagact |
| 98101 | ggcattacta gatggtgaaa actctggaaa agcccttaca |
| | actgaaaaaa gacagggagg |
| 98161 | gcaattatgg tacctacatc ttagggttgt tctgagaatt |
| | aaatgagtta ctacacttaa |
| 98221 | ggagtttaga gcactgttgg catgcagtgg |

[0314] following is a genomic nucleotide sequence of a PROL4 region (SEQ ID NO: 2).

| >12:10841901-10975900 | |
|---|---|
| 1 | tgaggagctt gaccagccct ttaaaccaac tcagcaagtc tgaatgatgt gcaaagggac |
| 61 | aattagatat gggtaagaag tccccaacct caacccataa aggactgtgt ctgaggttct |
| 121 | tacagcatca agggagatgg ataccatggc ttccatcaag gtgctgctag tcctgctctc |
| 181 | aaaggctttg gtgaccctga gctctgctca gagcatagat gatggcaaRa ggaggaaatg |
| 241 | gggacaatac aatggataac ggggttaaaa tgcatggaaa gtactagagt tagattgacc |
| 301 | ctttcagaaa ttaagcactt tattttcaga gagtaggtca ataaaagagg aggaaacctt |
| 361 | aatttctRtt tttcactgat tgcagatact tctctgaaaa tctcggccta agtcttaagt |
| 421 | caacgtcttc atgatgtaat tttgccgttc taatgtatat ggattttcag ttgttgattc |
| 481 | tgtttgtgtg aatcagggca tctaaattga acggaaaatc tatatttttc atttctataa |
| 541 | tctataatag aattctataa ttctataatt catctagata tcRcatttcc ttgacatcaa |
| 601 | actcttgaac atttaaaaat attgataatt ttgattaaat ttgtacttaa tcaaaatttt |
| 661 | gatgctaagc aggcactatt aaattctttc tattccattc cttaatcctt taaaatacag |
| 721 | gtcacccctc attcagagtc aatgattggg actagggttc tactttggga aactttggtt |
| 781 | tattgtatcc aaatctttat aatttttttt ccctaaagct ctcttaggca tttttaaatc |
| 841 | tcttgtgtct aaacctaagt gtctttctag aaattcacag ctggggtttt atcaaatcat |
| 901 | gttttaaatt tgtcttcttt ttcatttttt tttttctctt aaaatcctaa gtactgttgc |
| 961 | tgaagagttc tttcaagagt aaggtaaacc tttattcagg gatgtgttct tttctttgtt |
| 1021 | cttcagaagc taccatagtt ttcttttttg tttaataaac attctcaaaa ttctcaaaca |
| 1081 | ttctcaaaat tgagtttagg gagtcccaaa gggaaaaaga gaattacaaa atctgaaagt |
| 1141 | tttagtggtt ctcaataata acattgattg attgagacaa gcctcctctg tcacccagat |
| 1201 | tggagtgcag tggcatgaac acagctcact gcagcctcca cctcctgggc tcaagctatc |
| 1261 | ctcctacctc accctcctaa gtagctggga ctataggcac acaccatcac acccagctaa |
| 1321 | ttttaaaatt ttttatagag atggagtctc accatgttgc ccaggcttgt cttgaactcc |
| 1381 | tgggctgaag atatcctccc acctcgtcct cctgaagtac tgggactaca ggcatgagcc |
| 1441 | accatacttg gcccaataat gttaaatatg gaccatctcc ttcattttca cattagaatc |
| 1501 | tcttgtgtca gagttgtaat tagcatttga acatcagcag aatatagaca cagtacttat |
| 1561 | ttgtaaatgc ttttctctaa atctttctac aaccaatggc taatgattga ataacacaaa |
| 1621 | tctcccattt ttgcaagagc aataactccc ttgacatata actaatttga agcataaaga |
| 1681 | tacataaaat ttgcctacat tattgtagtc aatcagtgaa tgtatcattg cactttcttt |
| 1741 | tgccactctg aattaaaaca caaatgcttc attctttagt tttcaagtcc tgataactgc |
| 1801 | ttaaacacta atttgtcaca gagtaagtga aatttaaagc caccattagt cacacacagt |
| 1861 | ttacatgaaa aatttgaagt ccattctaat ggcctgggga gagactctgt gtaggaggaa |
| 1921 | ggatataata catgcccaga gtacatgaga gagctaatga attatgccac caaagaagtg |
| 1981 | gcagaattga gtaagtgagt caaccaacaa ttttgttgtt caaagaaaac ttttatgctt |
| 2041 | aatgattttt ttcccctgtt tctgacttgt caatgaccct tctactgagt ttatgatgtc |
| 2101 | atttcaaact tcattctttt tctcttcttt ctttgaagga ggctttcaag aggaagatga |
| 2161 | aaagacctaa ctaccatgtg agctattttg agttcaatta agttattaag aattgttcta |
| 2221 | aatggattca acgaacctct gggttactgt tctaataaaa catttctaca agtttttact |
| 2281 | gtaatacaaa taatcatgtt taaccatgaa aacttttttt ctctctttat ttacaaatat |
| 2341 | tttctttttt gtacacaaag ttcctggcta ctctaggctg gttagtacag ggttgatcac |
| 2401 | cctaaaatat ctttgccaca ataYgaatga tgtgcttttg atggtatgtc ccagatacat |
| 2461 | atttcctttt gtggcctgac atatggcatt gtctggagaa tattcaatat atgcttgaaa |
| 2521 | agagaatgtg ttgtctcttc cttttatgga atctttcata aatatcagat caggttgctt |
| 2581 | gatagtgttt gttaatgtat tctatattct tacagatgtt ctgttgttca acaaattact |
| 2641 | gaaatagaat cattgaaccc tttaaaaaaa gatgtcttat atacaatcca aacaatattt |
| 2701 | ctctgggatg tagagatgat ctacattgag gcaatatatc ctttgagagt tttgacattt |
| 2761 | tagcataacc atgtattagc ttttgattga atgtcttgtc acagcatctt gataatcatt |
| 2821 | gcctggtgca gtccgtggac atacgtcttt tgtggagaaa ttttcttcaa taaataatta |
| 2881 | atagttcaat ttaggcttct tattttatag acattttcta cataattttt ctcactttta |
| 2941 | cttatagatt gtccttcatt cattgatctg caattctcaa ataatctttg aacttactgt |
| 3001 | gacaatatat ttagccataa tatatacctt ttctgtgatt ataagattat tcatagaatt |
| 3061 | ccacagcatt tattaagaac tgtcacttta ttgagtcttt cccaaaagta gagctttgtt |
| 3121 | ggatgatcca agaggaacca tctaacgcgg actatgagaa ggaactagtt gcttttcata |
| 3181 | aagatgcaaa taacagcaag atgctgttac agttgttttg aattagtcac acaactttgc |
| 3241 | atctggaaac acggtttaga actatgaaaa tgccctctac tcttgatagt tgatattagg |
| 3301 | atattaattt ctatttgctc tgaaacatgt tttaaaaaac agcaactcta aagaaaggaa |
| 3361 | gagttacaga agagagaaac agggatacac agacagagtc agaaacagag acagagataa |
| 3421 | agagatccag ccagctgtac ataagattcc ctacattaca attacagata cactaattaa |
| 3481 | gttttaggag taattaatca cataaaacat taatgcaaga actgaagtta atttagaaac |
| 3541 | atcttatctt tgtttgtcct agaaaagcat agtttctctt cagatttgtt tatgttgttg |
| 3601 | gaattttctt ccttttagaa tagaYattac tttccaaatc acctttagag atgcatgtct |
| 3661 | taatttattg ttccccagta ttaggataaa tgaatgactt gaggggtaKa ttagagctat |
| 3721 | ggactcacca aaaatcacag ctaattccgW ctctggcata aagtagctgg aggtggcaat |
| 3781 | gagaaaggac aaatagtagg caataaagag gagaaggaag gaaatgacag ctttcagggc |
| 3841 | tctcacatgg gcttctgtgc tggggtctct gcaccctgtg gcactgagct gcattcgcct |
| 3901 | gatatgtctc cgcagggaga ggatcaagag gaaaaaggac attaggcaca cacaaaaggg |
| 3961 | gagcagcgtt gccaggttga gaaataactt ggtagaagca tgttgagttt tatttactct |
| 4021 | gcaactccaa gttaagtttg ttttcctctt tgccttcaca caaaacctga aatcagcgtt |
| 4081 | caaattctca gtggctggaa ggctaataaa cacagagaga accacgcacc ccagtagaat |
| 4141 | ccaggaaatc accctgtcaa ttctccactt catccagagg aaaagtgggt gaaagaaatt |
| 4201 | acctatcttg aagaaatagt aaatgctgag gcaggttgca aaccagatac ttaaatgatt |
| 4261 | ggttagtgtc cagaagaagt caatgattct catttcttta ccagtggcat agacatctgg |
| 4321 | atatagcacc aatataaaac aatctaatag tattacgcac aatagacaaa ttctggatat |
| 4381 | ggccagactt gtgaggatta aatcaatgga ggcaattttc ctcttcttga cccagtccat |
| 4441 | gcagtttacc aatccaatga atgcattccc taagatcccc actgaaaact ctccaactgc |
| 4501 | taagaacaat aaagtagtct gcactttatc tgccatgttt aaatatgcaa ttagtttcta |
| 4561 | gttgacctga tggagtttga catccacacc tgcttcttag attttgatgt agttttcttt |
| 4621 | acctctttgt tgtagtctgt tttgtgatgg agactggaat gataaatgaa gactggagct |
| 4681 | atcttcatta aatcctaatt agtcttgaca aacaatgtgt ttgScgatcc ttggcctggc |
| 4741 | cactgtatgc ccatttacct actcagcagg ttgtaatttt Ycacatacgg ttaatttagg |
| 4801 | ctgagctact gtttactaag atgcaaattg ggccaattcc ctttcatggt cctgcattgt |
| 4861 | ctttctgagg ctaaggtgta cgcattttgg attcattaat ttgtgatgta tgctagtaac |
| 4921 | ctcaataggg ttgctagatt tagcgactaa aaattcagga cactcagtta aacttgaatt |
| 4981 | acaggtaaaa aaatcaataa ttttttagtg tatgtccctg attacttaag atcagtgctt |
| 5041 | tcaggaagta ctgaagttca aattagattg agtgttccat tctggcaacc tgaacatcaa |
| 5101 | gaatttggta gcaagtataa aactggtaaa attggaaagt tcttgaagaa tttttatttt |
| 5161 | gctgaatgtt aatattgata attagtaaag aatccaaagt ttggttccat agtgagagtt |
| 5221 | atatattttc aggaacttta aaaagttaac actaaatgta ggttatttga ttccaaagaa |
| 5281 | actttaggtc attattttgg ctgttcagat gaacaattac atggcatagt gtctcttaat |
| 5341 | acaacacatt gtcttactga ctaaatgact tttaatggtt atttagcaat gttatatata |
| 5401 | ataaggtaga ggacctgtaa taaaaaaaga ctattgatta ccttaaattt ttcattttca |
| 5461 | cttaaaatgt tctcaaggaa actttgagag gtattagata tgtccattac cttgtttgtg |
| 5521 | gtgaagatat catgggtgtt tgaaatttta tacattaaat atatgcggtt ctttttatac |
| 5581 | caattatact ttcataaaga tttcaaaaat ttaaaaaatg ttctcaaggg tagttgtatg |
| 5641 | catgagagag gagatagtaa aattctgtat ttcattctct ccactgtcct ccatacaaat |
| 5701 | tgcatgagta tctagatcct caacccttct agcaggagac tgaagattaa actttccaca |
| 5761 | tctctagaga tgaattttta gtttgaaata gcttctctaa tttagagtta ctgagaagcg |
| 5821 | ctttactaca tggggttcca tagaatagtt cttgggtatt cacaccttcc tgggaatgca |
| 5881 | tgtcttctct tatccttcct taaaggacaa accatcattc cggagatgta gccttaactt |
| 5941 | ttggacaatc tgtatgatta tgtagccatg ttcacaggca actggaacat cacctatgat |
| 6001 | aggacgatct tggatatgat ccctgaccta gacttatcat ttcttttgtt ttttttttga |
| 6061 | gatggaattt cgttcttgtt gctcaggctg gagtgctatt ttggctcacc gcaacctcca |
| 6121 | tctcccaggt tcaagtgatt ctcctgcctg agcctgccaa Rtagctggga ttacaggcag |
| 6181 | gtgcaaccat gcctggctaa ttttgtattt ttagtagatt ccgggtttct ccatgttggt |
| 6241 | caggctggtc ttgaactccc gacctcaggc gatccgtgtg ccttggcctc ccaaagttct |
| 6301 | gggattacag gtgtgagcca ctgtgcctgg cctagactca tcatttttac cctacagttt |
| 6361 | atcctggtaa atgaagtgct catgggaact atgatgatgt attttctcaa ataattttta |
| 6421 | gacttgtttt tgtttagttt tggaaataaa tgtagatttt atgaatacca atgttgtata |
| 6481 | gcgtgaagtt atgtgaatat atagttaaaa aaaaagttct atgagagagc attttgtcaa |
| 6541 | aagcttacta ctttgaaccc cagtcactgt ggtcactaga gatgcttgaa acattagaga |
| 6601 | ggcaggaaac aaaatatgga agaaaaaaac ttaaccctaa tggggtaaaa ccttcccaaa |
| 6661 | agtactaatt caataaaacg tttatttcac ttaaacctta ggaaaaatat aaagttcatc |
| 6721 | ctagtataaa atctacctgt attttgtaga atacattaat atatttcatc aagagaacat |
| 6781 | gaattcttgt gtcttgtaaa acaaagagta acatatacag ctagcatatt agaaatatag |
| 6841 | ttcataaaat ttatatactt ggggctataa atattagtac tttacagagt gagttttaca |
| 6901 | taataataag acaaacaact gataattttc cggtaattag tattttagtt ataataaaag |
| 6961 | gaaattagta gattgaaata catcagaatt aaacagaaag taatgggagt aaaagcaata |
| 7021 | atgtacagcc atattagtac atacacaacc tgagatatgc cagaccaaac gtttcaataa |
| 7081 | tattatagtg aggatgKatt tcatgttcac agaaaaatta aaaattttag tgacttattt |
| 7141 | tccttttttt tttaataaaa atttatctgt attttttgta aacattcgtt tcttcttcca |
| 7201 | gggacagtat gtgcttattc catggtatac gctattttct tcccaattta tttcttttgt |
| 7261 | taagtcctga gtgaaaacct ttgcagggtc tggttagaga aaagaacctg attgagcagt |
| 7321 | ctgactaata tttgttatcc ccattctttt atccagattg tgaagagggc ttaggaacac |
| 7381 | cccttggtgg gtggcacttg aatgggttcg attcccacct aggtgctgca tgaaaagcaa |
| 7441 | gttgtttgag aggaaattta attccaagga aaatcaatag aaatcatcag aataaggtca |
| 7501 | accagaaaat attacctagg agaccatgga aatcatcatt cgggaaaacc aaagacagac |
| 7561 | cagagaacat ctgagttcct aatcaataag ccaaatgggg gtgactcagc agagccatga |
| 7621 | aaggagcaca attaaggagc ggcaataaaa atgtatgaca aagaaaaatg agaaaccagt |
| 7681 | tactgtagct caggtccact ttaccatgag ccaaagtaaa atctaaaaag actttaacta |
| 7741 | ggcaatacag gcctaacact tgcgttgagg agacaagaag agaagcatga gctctgaaat |
| 7801 | tcttcgagga aagggagtgt aaagatgagc atttctgagt tgtaaaggga tagaaaagat |
| 7861 | gtattcagta gtttgctact aggtcctaat aatatttaaa gatatgcatc caaaataaat |
| 7921 | gagataactg gggaaaaatg agaatagact attaagaaaa ctatattttt tgttagagaa |
| 7981 | gatttggttt taaattccat ttatacagct aagatttcat atcaYgcagg caatttttct |
| 8041 | acatgtcagc attctgacaa atgtctgcct cagtttatta tttaaaacaa ttaaaataag |
| 8101 | tgagtgaccc aaggggtaga gaattgctgc aatctctcca aactccacag ctaacttgta |
| 8161 | ttttgtcata agatagctaa aggtcatcaa aatagaagaa atatagtata ggaaaaaaaa |
| 8221 | gaagataaat gaagtcatag ttttaatggc tctcacatga acttctgtgc tggggtctct |
| 8281 | actgccggta gcatagagtt ttatttgctt ggtatgtctc cataaagatc ttactaaaag |
| 8341 | gaaaaatgat atcagtgaca caataaatgg gacaattgca aacaggttaa agagagtYaa |
| 8401 | gggttcaaag tatggtattt tactcacatg gaacatttca gtaatgtttc ttttatgttt |
| 8461 | ggcaattgca tgaaacctat aatcacaact cagtactatt gctgctataa ggctgaccaa |
| 8521 | caaggaaatg gcaaagcatc ccagcaggat ccagtgcacc accatatcaa ttttccactt |
| 8581 | cagccagaga aaaagtggat gagaggaact ggctatcttc agaaaataga agacattaag |
| 8641 | gcaggtggta atccacatat ttaagtagtt ggcaaatgtc cagaaggtaa aaatgactat |
| 8701 | ctgttgttta ttttttgtat aaacatctgg gttcagtact attacaatgc catttacaac |
| 8761 | cattacactg atcaaacaaa ttctggcgat aactaaattg gtaaggatgt agtcaactgt |
| 8821 | ggaaatcttt ttcttcttaa tccagtcaat ccagttgact agtgcaatgt atccattccc |
| 8881 | caatattcct agtatgaatt ctccagttat taggattata aagatgttat ctgcaggact |
| 8941 | gaacatgttt gtagagagaa caatctgatt tcaaatatca ctgtagatga gctaatttac |
| 9001 | aggtgacctg ttaaagcatg atagatcaat tcttcgaatc atgcaataat gttttcatct |
| 9061 | gctgttattt cgacgttgtt attcttccgg aagtgttcag ctctcctctg aaataggatt |
| 9121 | gtctctacac tcctgaagat gaaaccaact aatgagcagc ttgactagtt atttatagcc |
| 9181 | tggaaaaatt ataattatta tcctttagtg agtgatacct gaaatgtttg gctgaaattg |
| 9241 | ctcccatgca aattcaaaga gattttatat catgaatttg caacaggctt cttgctgtag |
| 9301 | ctctatattt ggatcttcaa attgagtttt gaatagggag tcataaaaaa agagataaat |
| 9361 | gtttaataaa aacccaactg tgtaaataaa acttcatttt catcatgtaa gttataaata |
| 9421 | agccacaaat cagttctccc agatgcaaag aaattttcac tttggaagta attagtacaa |
| 9481 | ttagattgta gatatttaac atttagtcag aggataataa ttcttgtctt catttaaacg |
| 9541 | gctaattagg gaaggatata atacaaatct aattagaaat gacttttttt taggcaggca |
| 9601 | catgataata tttactaaga atttgctttc ttttcaattg ttcctcagaa gtgaaatatg |
| 9661 | ccaggtaaag atttgttatc tttagttttt ttttaatgtg acaaataccc ttgaagacaa |
| 9721 | ttcatttcct gaatcactgt ctcttgtata ataagcattg taatctaaaa ttaagaaaat |
| 9781 | ttaaatttta cattattcta gttccaatca actcctttta taagatttgt aatctcacag |
| 9841 | tgcatattat agtcatattt ctagataggg caaacacata aaaaagtaac tacttgggag |
| 9901 | actgaggcag ggggatcatt tgaaccggga ggcagaggtt gcagtgagcc aagatcgtgc |
| 9961 | cactgcactc caacctgggc gatacagtga gactctgtct caaaataata ataataattt |
| 10021 | ttttttttta cataccagta tttccaagga ataggactaa ttctactatt aaattagatt |
| 10081 | tatttgtttt ggggtaaggg aaagtacaac ttagcccaaa atacatttga atgtaggtaa |
| 10141 | tacRaatcac aataccctag ggcttcttgt atttaaatag ttctacaatg tatacaacac |
| 10201 | atgcaggatt ttttctattt cttacatgtg tgtaatgtgt aacaggaaag cataaactta |
| 10261 | ataacttaaa gaaacctagt tatctataaa ctactgctgg aaacaaaata gaaaagaaaa |
| 10321 | tgatgcagag ggaaaaaaat atgtcagaga tttctgagtt agaaggctag agagaacatt |
| 10381 | ccaRggaatc tttgggaaat gacttctaaa attgccatca ccagctagag tactcatgaa |
| 10441 | cacgctgact actgggaccc tcaaccttct ttctcaaggt ggttctgcta tacataactg |
| 10501 | tgcctcctct ctctgtcaaa ctttcattct tgagattata ctccttttcc cacatcatat |
| 10561 | atcatcttag atagaatctc attaaagatt gtttttctcc cttcttgatc aagacaaacc |
| 10621 | cttccagaaa tggagaggaa agggcggtga agataaggac cggccttcat ttcaaagtag |
| 10681 | agagttgttt tgcatgattg attttatagc aagggttgat gagttctaaa atcttttccc |
| 10741 | caaagcctgt ttgcctgaca ttcttctact cattgagttc aaggcctttg ccagtatttg |
| 10801 | tcagaaaaga agtagaacct ctttgtattt agtcaatgac ataaaatgat gaaatgttag |
| 10861 | tgtgggattt agatgcattt tttttttctg caacgacaaa gaatatacgg tgcaatgata |
| 10921 | acattagatt atccattaaa caagacaaaa gtgtgaagga acacaaaaca aatcttcaga |
| 10981 | atcatgacag atattaatga cttccaatag catataagag aaaatgaatg caaacaagag |
| 11041 | aagggagaat gccttttgtt gatttctttc atccttgtag tcaggatact ctttaggggt |
| 11101 | ctctatggaa caaaaRgctt tcttcttcta aRgaaacact tcacaaatct taacatcttc |
| 11161 | agaaaagctt ccctcaactt gctatttccc ataattagaa tgaatgaatg gcttgatggg |
| 11221 | aaaatgacag ttactatgtc accaatcatc aacactaatt ttccctgagg aatcagagcg |
| 11281 | ctagaggtca taacaagaaa gactgggtag tacacgatga ggaggagcag aaagatgatc |
| 11341 | actgccttta tggccctcat gtgggcctct gtactggggt ctctgaaccc tgtagcatgc |
| 11401 | agtcgaatct gcttggtgtg tctaactagg gagaaaagta acaagaaaaa tgagatcagg |
| 11461 | caaaggataa agggaaccat cRcccccagg ttcagggtta actgtttgaa agtacctgga |
| 11521 | attttactca ctttgaattt ccaagtaatg ttttcttcat gactgacttt gaaaaggtga |
| 11581 | taccacatat catcattctt tggaacacta ataattaaag agataagaaa ggaccccaga |
| 11641 | agaatcgcaa gcatgacctt gttgatcttt agcttcagcc agaagaaaaa tgggtgcgat |
| 11701 | atattggcta tcttgagtaa atagaagata ctgaggcaag aagtaaacca gagacttgaa |
| 11761 | ttattggcaa atgtccagac aacattcaca atgcttacta gcacgctatt gccatatgta |
| 11821 | cctggaaaga gcagcataaa gaagccatct aatgatatta cacacagcag acagattctg |
| 11881 | gagatggcca agctgatcag gatgatgtca atcaaggaaa tatctcttct tttgagccag |
| 11941 | tcaatgcagt taactagtac aatgaatcca tttccccaaa tccctatggt caattcacca |
| 12001 | gcaattaaaa taatatatat tgcctctatt gcacttggca tgccagcaaa gacttgtgat |
| 12061 | ttttgaatat cactgatgat gaattgactt tcagctgacc agtgaagaac aatgtatctg |
| 12121 | tctgcctctt agaccatgat atagttgtct ttatctctcc tttttgttag ctgtgatgca |
| 12181 | gatgaagaag atagccagtc ctgctctggg ctagagctgc ctaaagactt caatgattgg |
| 12241 | ggccagtaat ttcctttggt gcagtgatga ctgaaagcct ctaggatgca aatgggaatg |
| 12301 | gatctgattt cttaaatttg cacactcttt cttattttaa gctctgtata ttttggattt |
| 12361 | atcaatctga gctgttgacc aggaacttca agaaggtatc aattacttgg aaaatatggc |
| 12421 | tagaatttaa tttgctggat gactatccat ccttgttagt atattgacat agttattgct |
| 12481 | attacagatt ctaggtttac tgtgttagct tgtgtggcca gtttgcttgc ttggttgact |
| 12541 | aaagctttaa acaaattatt attaacatta aatgaggctt aaatggcata actggtggaa |
| 12601 | tgtagaggaa agaatctaaa ggtgtaggaa gataggagta ttaaggtgaa tttatcatat |
| 12661 | gcgaacttca ccttctcccc attatatgac ttaagagggc caaaaggaca ctccattcac |
| 12721 | tagggcattg agaaatacat taattaggta attcccaata tcctcaaaaa gctctgcagt |
| 12781 | gtttgtcttc tcaactgaag atacaatgag ggaaataaac atgacattgt agtgttgtca |
| 12841 | gcaaatgaga cacggaaaat tctggtttag atgttagggt ttcttagagt gttcttgctt |
| 12901 | tgtacctgaa tgtagcttcc atacatagaa aaaatagtca aaatactggt cacttatctt |
| 12961 | tagaatggaa acagatcagc ctgaacagtg aggaggacaa agagcaagaa agtgatattt |
| 13021 | ttggaactaa aaagcgtgat agatatacaa gactcttcag tctgaactga gtgataagaa |
| 13081 | tacatgctct gaattttctt agctctattt tttggcagca ggtgtattat aaatattagt |
| 13141 | atgctaatta tacacacatt ggaaacacac tgtttcattg ggacatattg aaacatgtca |
| 13201 | ttgggcatag tagaacatat ttgaaataat agaaaaaggc acacagcaat acacagttcc |
| 13261 | cagaaatatt attttgaaac taatattaaa ttttaaggca atattaaata ttgcttatca |
| 13321 | aacaaacaca acaatacaaa gtatttaatg agataatgtg tcatatgttc agggttttag |
| 13381 | acaaaataaa gagataaaaa ttaatcttgc agatttttat gagaaagtaa atagctattg |
| 13441 | ttattctatt cagtgaaatt tggggtttct ttcatgcttc tctgtgaatt ttgtttctga |
| 13501 | agaaatatca gattatacaa ctcaaaaata cacactgtgc ttgtcatgac caaagccata |
| 13561 | aaacaggtaa tattctgaga aggacttcac tagagtaaag aaattgattt gcatgcaact |
| 13621 | gacagacaag gtcgcaccat gttcacatct cagggaatgc aatatttcat tattttaatt |
| 13681 | aaactttttg aaagataaaa ttttgtggag gggaataaag taggttcaag gttattattt |
| 13741 | ggaaatggaa ctactctggg atcaatttgt aatgtccaga aaagatgaag atgaaaatat |
| 13801 | atcatgtagg agggtgatta ataactgaca tattaaaaat tcctggtaaa tccagatata |
| 13861 | gaatccaagc ttgccttctg aatcatggtc tttcccacta cctcacttct tttccttagc |
| 13921 | cgtgtggaat actgatcaat ttaagaaagt tatgcctata ttcaaatgta aacgaaaata |
| 13981 | tgctatagga tatgaccaga gttacctaag ggcctatact tactaaaatg ccaccctctt |
| 14041 | ttatctttcc ttgctataaa taaaacccaa atgatctcaa tttatttgac accgttgaat |
| 14101 | atgttttttt tgtgtgtatt gtgtgtgtgt gtgagtttat gtgttatttg ccctttggat |
| 14161 | tttatcttag cattgagaag ttaaagaggg atcctagctg acagacttta acatctattt |
| 14221 | tcattgcaga aacactttaa tctagaatgt tagtttattg attatttctg tctctactag |
| 14281 | aaaacagatg aaatactggg aaacttatga catcatttcc tgtatgtctt tctatgagaa |
| 14341 | gtgagcaaac acaaacctac ttaggcagat atttcttaaa tttcattttc tttcctttgt |
| 14401 | ttaaatactt tttaccattc tttagaacct tacatctttt acaggcattt gtccttgagt |
| 14461 | tatgccactg attattactg atcaagagaa atgactatac tcttcagatt tataaatcaa |
| 14521 | gaacaggata ctgcgatact gtcYtatttt ctgacaactt atattttgaa tagttgctga |
| 14581 | ctttatctcc taccccattc taaactcttc actatatcca ttgggatccc tagtaaacca |
| 14641 | ttagcagaag ccatatattc tcatttgttt ctctaacagt tcactttatt ttcttcattt |
| 14701 | gaactcgagg ttctggaact tttttgttca atggactact ttgccagtct ggtgcatgct |
| 14761 | ataatttcag aataatgttt ttaagtgcat gaaataaaaa tatttgaaat gtataaggaa |
| 14821 | tccatatata tatgcctttt tcttgcagta tgaaatatat tgttaatata atataggaat |
| 14881 | ttatgtgctt tttaattgac ataacaaaaa tatctggcag ataaagacta gtggtgaaag |
| 14941 | taaatgacaa taggaggtac ctgtaacgac aaaaattttt ggcttcctga agtgaaaaaa |
| 15001 | ttacagatac tgctggtatg gtatgtgctt gttacttaca ttcaagacag aagaaatact |
| 15061 | agacttaagc taaggattaa taaaaataag tatataattt ggtgcccctc ccagttcatt |
| 15121 | catcactcat gtccatgaat cttttcattt taatactcta caattaaatc ctgtggcagc |
| 15181 | tgttttctct ctcacaccct catagaagtg ggtctaaagc tgggatgggt gtttttcttt |
| 15241 | ccctctcgta actttcagat tactctactc tctttccttt ttcctttttt tttttttttt |
| 15301 | ttttgagaca aagtttcact gtgttgctta ggctgttctt gaactcctgg cctctagtga |
| 15361 | tcctcctgcc ttggcctccc aaaatgttaa gattacaagt gtgagtcact gtgcctggcc |
| 15421 | agattattct ccgtctaatt cctcacaaga catacagcag ttcattatct cctgtcatca |
| 15481 | ctctatacaa aatattacct ttccttgtca caatcataag ccagtcttcc ttccttgatt |
| 15541 | tttgctttct acctgaaatt aagtagttaa atatactaaa tttcaccacc attctttttg |
| 15601 | ctaaagttcc cctatctttt tgttggatga aataatcttc tattttttaa aaaaattcat |
| 15661 | tcagtaatct tgtttgttgt atttttcWtt ttttaaaatt taattatgga catataatag |
| 15721 | ttgtacagat gtatgggggt acatgtgaac ctcatgaaaa cagagcaata taaagacccc |
| 15781 | tgttgagaag ggataacatg aatgagaaat atgcatgtct ctttaagaag aggaacagtc |
| 15841 | ttaattaatg gataactata tagagtcaat aattcaagca taaaacactt tattataata |
| 15901 | gcatattggg aatagtcttg tctatttgta taaaaatggt gaagaaatag aatatttggg |
| 15961 | atccatggag acaaataatt tatttgctaa ataacaaaat ttggacaagg cttgaaatat |
| 16021 | atataacagt taagagcttc agctctggtg ccagacagct ggagttgaag cttattctca |
| 16081 | gttttaatga ttgtgtgatt taaattgtgc tgaatctttt ctttctccaa tgtgtaaaac |
| 16141 | attgatcata gtgctatcta tctcatagaa atattatact taaataaagt cttgcattta |
| 16201 | aaatacttag aatagttctt accatatata ctcaaaaaat tttaggtact attattattg |
| 16261 | aattttttgg cattccattc aataaatcac gattctctta tatagttgtt ttgctataga |
| 16321 | gcctttatta atgtgtctta attacaattt cctatccata atatttggcc aaatttcaca |
| 16381 | ttttatgatt gccatagttt gaatgtttgt attttcttca aaattcatgt ggaaatgtaa |
| 16441 | tccctaatgc aacaatatta agaggtgggg ccttttagga gatgattatg atgggtttgc |
| 16501 | cattatgatg ggattaaaag gcctgaaggg aactaaatag gtcttttaac ctttcccctc |
| 16561 | ttctgccatg aaaagataca gcattcaagg ttccatgttg gaagcagtga cgaagccctc |
| 16621 | accagacacc aaacctgcca ctgccttagt cttggacttt ctagccttca gcactatgaa |
| 16681 | aaaataaatt tctgttattt ataaactacc tcatctcaga tactttttat agcagcaaaa |
| 16741 | tggactaaga caatgccagt cacatgaaat cataaaatat ggcaacataa tagttatggt |
| 16801 | ttaacaattt gttttgtttt ccattactca ctgaaaatgt aaacaaactt aaatggactt |
| 16861 | agttgttttt ttccttcata tgtagttctt ttctttattc aatattaatg cccagtgcat |
| 16921 | ctcataatat taatggacag gtgactattt tgtttctctc tgcaatggca taaataaaat |
| 16981 | gattttaaca gcatttcaac ttaaacacaa taaattattt atttatattt gacaacacat |
| 17041 | ctaaatgttc aggttaagta aaaatattct cagatatata ggtttcagac gtttactaaa |
| 17101 | catagaactt ttttcaacat tttggaggct acattaacaa aaactataat ggggtgagga |
| 17161 | gatacctata tgaatatgtg gagtaaagtt tataagaaat tttgtaaggc ttaggatgtc |
| 17221 | aaaaaatttt ttaaaaataa gaaaagaaca tttgtatact ataaaaatct taaaactcca |
| 17281 | gttgtaggta gaagatcaac acataaaact Stgttgtgtt tctacacacc agcaatctga |
| 17341 | acagtgaata taaaaggtaa attaagaaaa caattccaaa ataatgaaat aactaggaat |
| 17401 | aaatttcacc aaagaagcaa aatacttata tacaaaaatt gatgaaacat tgctgaaaga |
| 17461 | cattaaggaa gacacaagta agtagaaaga catcccatgt tcatggataa gatgacttga |
| 17521 | tactgttaag atatcaatac tacccaaagc aatctaaaga ttcattaaaa ttcctatcaa |
| 17581 | aaatttctac agacttcgtt tcagaaagag gaaaactaat gctcaaattc aggtgaaatt |
| 17641 | acaagggaat ccgaataccc aaaacaatct ttaaaaagga gaacaaagtt ggaaaactca |
| 17701 | catttaatat ttttatttta tatatatata tatacatata tatatataca tatatatata |
| 17761 | tatacacata tatatatata tatatatata tatatatttt tttttttttt tccctgtatg |
| 17821 | cctcattaag Kcttccctga gccctgggct ggcttcttcc atggaagata gcagaagaag |
| 17881 | caaggcttgt ccctgttcac agaagatgct agccagatca ggagctgaag atagcaaaag |
| 17941 | agggagaagt ccaacccaca gtcccaggcc ctggtgagta aggtctggtg cgaggagaag |
| 18001 | gctgatgata tggaagggtg ctccagtcct gcttcttctg cttggaaatg gagaatccgg |
| 18061 | agaacctggg ggatgcaaga tggacaggct gctccttgag aacatccagt ctcctagaaa |
| 18121 | aaatgggtgc tctcaaggtg actgaatgaa ctcaactatg ccttgttatt ttaaaaccca |
| 18181 | ctgtctgctt tctgaattga caatcaagaa tccatgtgtg tcttaaacaa caattgttca |
| 18241 | ttgtagtaga acccactggg agaagccttt tggctcagga actccatcta gccacagctg |
| 18301 | attgaattag gggtggatac ctaacccaag tggagccaat cttattctgt gcccactgca |
| 18361 | atgtaagatg taaaataggt atttttgtct ccttggatca gtgctgtatc tttagtgtct |
| 18421 | agaattctgc ctaccacaca gtaggggcta catgaatatt taatgaacaa atgaatgaat |
| 18481 | aaataagtct ctgtgaggaa tttggaattt tgaccttgga aacacagaga atggcagttg |
| 18541 | tggaaactga gtcacattgg ctgcataagc tagaaagaac acccactcct tcccatgtct |
| 18601 | gaggtcttcg ggtctatctc agtcatgact gagtcctgac tctttctaaa gatgattgga |
| 18661 | ctcctcttaa ctttaggaca gatggctcaa catcctaact ataaaactcc ttcctccttt |
| 18721 | cctgcttaca ttcatttctg ttgcaaccaa aaacctttaa tgacatgctg agaaattttg |
| 18781 | caccttgaca tattctgttc cccaccttag gagcttctct aggagtcata atcactcctg |
| 18841 | gctgtacctt gggctgcatc cagatctgcc ccaatgccac cacccccagc tctgtgggct |
| 18901 | ctggctctaa gactacaggg acccagaagc aggaaagagt ggcatcatgg aattccatgt |
| 18961 | cctttagggc aggtgggagg tactatgcct cttctccatc caagaccgct cactacatcc |
| 19021 | tgtcctcaga tatggctctt gggaccctca agtcagatac tcctaatttt tcatctgctt |
| 19081 | ttgctctaca gacagaaaga ggaggtgcca aagaaatcta cagattcatt caaatcctta |
| 19141 | ttaaaaattc tcacagactt tttttttcag aaacagaaaa attgatcctc aaatccataa |
| 19201 | gaaattacaa gaaaccttga atttccaaaa caatcttaaa aatggagaac aaagttggaa |
| 19261 | ggctcacact taatatttta aaaattcact acattacttc tcagcctttt ggctaagatc |
| 19321 | aagtataaaa cttactacaa agctatggta atcaagactg tgttttattg gcataaggat |
| 19381 | agacatatag atcaatgtaa tggaattgag agtcttgaag taagcccata tatctatgac |
| 19441 | taattgattt tgacaagtgc gtaaaaattc attagggcat aaagagtctt tttgacaaat |
| 19501 | gatgctagga caattagata tccacatgca agagaatgaa gttggacccc taactcacgt |
| 19561 | catatacaaa acttagctca atatggatca atgacctaaa tataacaact aaaactaaat |
| 19621 | acacctagaa gaaaatttag tggtaatctt tatgaccttg gatttggcaa tggattctta |
| 19681 | catatgacat gaaaaaagta agccacaaaa gaaaaaatac ttaaattgga cttcacgcaa |
| 19741 | aataaaactt ttgtgtatca caagccactc caagaaagtg aaaagacgat gtatagactg |
| 19801 | ggagaaaata tttgcagatc atatatctgc gaagggctta aaattcagaa tatgtaaaga |
| 19861 | acctctacaa cccaacaaaa aatccaattt taaattgggc aaaagatctc aacggacatt |
| 19921 | tctccattga tttacaaatg tctagtaaac acataaaaag acgctaagca tcattagtca |
| 19981 | ttggggaaat gcaaaccaaa accacagtaa cRtattactt cacatccact agaatggcta |
| 20041 | tagtaaaaat cctggaaaat aacaagggtg ggcaaggatg tggaaaattt ggaactctcg |
| 20101 | tacattcttg gtgggaatgt acaacgataa atctactgtg gaaaacagtt tggtgactcc |
| 20161 | acaagaagct aagcatagga attgctgtat tatccagtaa tttcactcct agtatacatt |
| 20221 | gaaaacagga actcaaacag atacttatgt gccagtgtat attgcagcat aattcacaat |
| 20281 | agcccaaagg tagaaatcac ccaagtgttt ttcaactgat gaatatctaa acaaattgtg |
| 20341 | gtgtatacat acaataaaat attattcagt catacaaaag aatgatggtc tgatacatgt |
| 20401 | taaaatattg gtgagcctta aaaacatgct tagtaaacta aaccagacat aaaatgagaa |
| 20461 | aatctgtgtg attctactca tatgaattgc ctagactagg ccaattcata aagccaaaga |
| 20521 | ggagatcaga ggtcaccagg aactgtggga aaggaaaaat agggagttac tgcctaatga |
| 20581 | gtccagagtt tctatctgtg gtaatgtaaa agttttggac acagaggtga tgcttgcaca |
| 20641 | acattgtgaa tgtagttagt gccacagaat tgtacactta aaatggttaa aatgacaaat |
| 20701 | ttgttatata aatgttatca caataaaatt aaaacaaaat aaatgtgtaa attaaaaaat |
| 20761 | taatattcca gaccataaaa acatgcagca tggaaatgac tgtcattaga taagaacagg |
| 20821 | ttaaactttt aattttatat gaaatgaaca taaagatacc aattttaaac ccagcacatg |
| 20881 | aaaatttgat atcaatagaa acaggaaagg aaaaagatct gcaataaagc attaaaatag |
| 20941 | agtaaaaaga agaaatgaga agatagaaaa caatgcaatc acaattgtat tgagtgtaaa |
| 21001 | aatgtttctc aatagtaatt ttgagattac attattaaat aaagtgtcaa aaatgaaata |
| 21061 | tttgttttct acaagagaca tttaaaaata aaatgcagaa gtgttgaaaa tgcagaggtg |
| 21121 | gaaaacacac aatttagaaa tgataaatgc ttgaagtgat ggatcctaaa tatcttgact |
| 21181 | tttattacac attatataca tgaaacaaaa tatcacatat accttacaaa gttgaacaaa |
| 21241 | tattatgtat caaaataaaa taaaataaaa tgtaacaaaa ttagggaatt taccaagggt |
| 21301 | gaaataaaat ttaaagcaaa aattttcatg gcaaactttt ttaatatcag taaaaataac |
| 21361 | cataaaaaag taatgaccat gaataaaaat gcaattatca acattgcttc aaattaaatg |
| 21421 | caactacaaa taaaataatt atgagcataa agaaataaat cagtaattgt aagtgtaggt |
| 21481 | ttactaattt aactattgga aattgtcata tattaaagac gtaaacaagt aatatcatta |
| 21541 | atattgttca tctaatgcat atacatttaa ctttaacaca tcaaactcat ttaaagaaaa |
| 21601 | tcattcacaa aaatggatca tgtattgggc caaatgaatc ttatcctagg ccaaatatca |
| 21661 | tacacatatg ctgtctgact caaataaaat aagatatcaa tacaaaagtt acctttaaaa |
| 21721 | atctcattat tgttaaatat ctcttgcatt aaaaggaaag tgtaaagaat attttgaaat |
| 21781 | tatttgaatt gaatacaata taagaaccat gtgccaacat ttgtggaata catataagtt |
| 21841 | gatatttggg cagaaaacat acaattttga atacctttac taaaaaaaaa aagaaagatt |
| 21901 | ggacaaagct agtgaaacaa acaacttttg ccttcaaaag tatggcaaac cattatccta |
| 21961 | agcaaattaa cacagaaacc gaaaaccaac tatcacRtgc tcttgcttat aagcgggagc |
| 22021 | taaacattgg ttcacacaga cgtaaaaatg ggaacaatag acactggcga ctaagtggag |
| 22081 | agggagggat ggcaggggtc agggggcaag gactgtcaaa ctacctattg agtaccatgc |
| 22141 | tcactacctg ggtgatgggt tcaattatac cccaaacctc agcatcaagg aatataacct |
| 22201 | actaacaaac ctgcacctgt accccttaat ctaaaataga agttaaaatt atttttataa |
| 22261 | attaaaaaaa tctgtataaa aatatatgaa aaaccagatg tctggaaaaa tccttccagt |
| 22321 | caggaaaaca taaagatact gaaaaagaag ccttcagaaa tatttttaaa gtgtatggtc |
| 22381 | cagctgtcaa gagagttaaa aaagaatcct cagatgccaa aaatagtagg aaagtgcaaa |
| 22441 | tcatgagagg aaacagtgct gaagatagag ttagtcccta actaactatc ttggagttgg |
| 22501 | atagaggagt ttatcgagga gacggcattg tcactctcct ttaaaccagt gtgtaagtat |
| 22561 | tttttaattt tgttatgttt ttaaattgat gttccgcagt gaaaaggtat atgcaaaact |
| 22621 | atccctaaag gctgagggag ctgagaggcc aaagaaagag tctaacaatt ccagtttctc |
| 22681 | aaaaagaaat atttattgat ttatttataa tttttacttc aacaactttt tgggtacaag |
| 22741 | tgtttttttg tcacgtggat gagttatata gtggtgaatt ctgagatttt agtgcaccca |
| 22801 | tcacctgagt agtgtaaatt gtacctaata tgtagctttt ttatccctat cctcccttcc |
| 22861 | Rgcctccccc ttttgagtct ctaaagacca tgatatcact ctgtatgtct ttgtacactc |
| 22921 | atagcttagc tcccgcttat aactgaaaca tacagttttg gttttccagc catgtgtgtt |
| 22981 | acttcactta gaataatggc ctccaggtct atccaagttg ctgcaaaaga tatatatatc |
| 23041 | ttatacatat atatatctat cttatacata tatatatctt atacatatat atatcttata |
| 23101 | catatatatc ttatacatat atatacacac acaatctttt ttaaaagaaa gcaatattta |
| 23161 | ataggaactt ataaacagag gcaatgtctt gggtggccgc aagatattgg atccccacag |
| 23221 | ccgccctcca gaaaatatcc tttatatatt aagctttttg ggtaaaacat gtgcagctct |
| 23281 | tcatacctca ggctctcttg ctaaaactta tgaccattaa gaaggttaga taagcatctt |
| 23341 | tatgaggggc tctctatgtc acaggaatta tttaaagaac ttgctgcaga acacattggc |
| 23401 | atgcaggagt taaacatcag tcgttgtggt agtttcgctt caggatggca tcactctttc |
| 23461 | tacgcaataR gctattttcc tacgttatat aataattact gtacacattt atcaRgtaca |
| 23521 | tagtgatgtt ttgaaacata caatgtatag tgattcaata ggttaataag aagatctatc |
| 23581 | atcttaaacg tttatcattt ctttgttggg aatattaaaa tcctccttcc tggtatttaa |
| 23641 | aactatgtat tattgttagc tatagtcatc ctatagtcct ataaaacact agaacgtatt |
| 23701 | cctcctatct agctgtattt tgtatacttt tacaaacccc tatccttccc agcctctggt |
| 23761 | atactctgct cttcttttta cttctatgag atcttctttt tttagtttcc ttatatgagc |
| 23821 | gagaatatgt ggcgcttaac tttttgtttc tggcttattt caRgtaccat aatgtcttcc |
| 23881 | tttccatcca tgttgtagca aatgacattt cattttttaa aaaaaactgt tatggctaaa |
| 23941 | cagtattcca ttgtgtacat atacagcatt ttcttcatcc attcataaac cagtgcttat |
| 24001 | gttttaaaag accatatgca tgttggataa gatacctggt ttggacttct ccaaagttag |
| 24061 | aagtgagatt ggatactatc aacaagccaa gatccctgaa aggcaaaMcc ttaataggca |
| 24121 | aatgagaaaa taatataYgt ccaacaaaag gctaaagtag gaatacttaa cactcagcca |
| 24181 | gggcagtgaa ttgaaagggg aatgtaaagg ggaatgaaag aggaatgttg ctctaagaat |
| 24241 | ttgttataat agcctttcac tcatgtatat ttggggctag aagttgaatt ctacatagcc |
| 24301 | taaatcatta caaactgaaa agtttagctt aaagaagttg atactggaag tgatcccagt |
| 24361 | cagcctttac aaagtcaaac tttttctggc agacgtcact gtaaacctga tctcaaagaa |
| 24421 | ttcccacaga taatattcta ataaaactga gttcaaaata aaatcataaa acatgtgagg |
| 24481 | accaaaccaa tataattgaa agttagtaca aacaacaaag ttagtaatca gagctacaaa |
| 24541 | ggcagcagat atcagaatta gagcttctgc agtctgtgca aatgctaagg aaggttcttt |
| 24601 | ctctttccct tgtttctcaa agcaagtatg actaaacaga tattttttca caggcctcat |
| 24661 | cttttattta attatatttt tcatatgaca taaattattg catagaaaat tacataatac |
| 24721 | tacaagaaaa taaaaattat ctataatccc aatatctaca ggtaaagaac ctagacatcc |
| 24781 | agtttatgta taaatctaat caaaacagat tttttaagta acatgcttat tatctgtcat |
| 24841 | ctatctatgt tgagatctat tttacaacgt atgtagaaac atgttaacaa tggttagttg |
| 24901 | agtactgcaa atgtgcataa tcaatttctt ctttatatat ttttgtgttt gctaatttta |
| 24961 | gatgaaactg tattttatag tacaaaatgg agcttttgat gaaaggaaca ggtatcagta |
| 25021 | aaaataagct aatattggca aaaatagcag aagaaaacat aaatcaatat gagatcatgt |
| 25081 | aaattaccca cctattgccc caaacattac aaactagtta cttactaaac agcaaattaa |
| 25141 | gaaaaaatca taacacatat atggcatagt gttaatgtat aaactagtca caaaattggt |
| 25201 | aagaaaaact ataagacatg aaaaaataag gagaaaacaa atgaacaatt cccaaaaagt |
| 25261 | atatgctatt ggttaatccc gtagtaatgc ttaacttcac tagtaatcaa atatatgtga |
| 25321 | agtaaagata tttttgcaat caaagtagtg acattaaaaa taataacctg tttgattttg |
| 25381 | agactgcaac aggacggata ttttttcact attaacatat aggtttatta tatctacaga |
| 25441 | gcaatttatc aattctgcaa ggaatttatc aagtttctcc ccattggaat tttccttaaa |
| 25501 | aataatttac atactgctgt ctctatatat tagtcacact ggacctttag tttctggact |
| 25561 | accctctact ccttcttgct tcaaggcctt gacatgatgg tttcccaccc caaatttctc |
| 25621 | ctcttttgtc caccatactc ctacacatta ttaagatatc aaattaaacc atcttaacca |
| 25681 | cagtgacatc ttgtccattc tcatgaccag gtcaggtcag catcctatag tttttctctc |
| 25741 | ccaatatcat aaatatcatt gtttaagtta gctagctatt catttgtttt ctattagaat |
| 25801 | atattatcca ttatattggt atgttgttca ctactatatc ctcaatacct agccaagtta |
| 25861 | gcattcaaat agtattcata tgaatgaata gtattcactc tctataatac tcatattatg |
| 25921 | tttatttcta aaagtggaaa actgaagaca acttaaacgt aaacgatatg ataaacacta |
| 25981 | agtatattat tgtatatttg caaggggagt tattatgtac cccttaaaaa gattattaca |
| 26041 | aataattttt gaaaacatgg gaaaatgaat aaattctaca taatcaacat aatctataca |
| 26101 | gagaacatag ttctttatac aatataattt caaatgagcc aacctggtat atttggttga |
| 26161 | aataggcagc agcattaggt ttttttttct gttatctctt aactatctgt acattctaaa |
| 26221 | cacaatagtt taaaaatata aaaatattga tttggaaacc tgacatagaa aattaattaa |
| 26281 | gtccttatat ttggaaatat tccactcatt aggccataag tatgagatca aggcactttc |
| 26341 | ggaagttgcc aaaataagtc actgagttta taacctgggt tggacataaa agttaacttt |
| 26401 | aaaactcaaa atttgaaacg tttctgtgag tgcaagtttg tgtatatgaa tgtgtgtgtg |
| 26461 | tgcatgttYa tgtgtgtgtg tgtatgaagc ctgaagacag aacatttcat atttcaccca |
| 26521 | gattctatcc tgtgttcatc ttgtgtcctt tggtcaggga ctgtgttgaa tcttgcagcc |
| 26581 | tttggatcga tgcttctaga aaaatcttta ctcaacttta attggttcat aacctgcctt |
| 26641 | atctcaaatc actgattttg aagagcatat ttatttcatc agtgttttga tcccatatcc |
| 26701 | ctcaactaga cccttgtttc cctaactata tttcacagaa ctacatctac tcctctgact |
| 26761 | acttgctaca catcgtacac cagtaaaaaa ggatgttaga ttctaaaaaa tgaaaaaaaa |
| 26821 | acctttaaat aattaaaata gcattctgta aagaagtacc accatctatc ctcacttcca |
| 26881 | tgttctaaat gtcaagattg atctaatttt ctttctttct tttttttcct ttgggttttc |
| 26941 | tgggagaatg ggtgtccttg cttcagaaaa gtcaggtaaa gcacaacaag aagttttatt |
| 27001 | ttagagctta ttctcaccgt tataatcttt acagcgaata gtctccaggc tgatggtctt |
| 27061 | cctctaggaa gtttgtagga agaagttgca gggtggggaa gctgactaag ccactgaatt |
| 27121 | tgcatgtgag attaaaatct cctcaaagac tgagattccc tgaaacatag tcaaaacaat |
| 27181 | tatggaagat ttcagtgatc tttaatgaca cagttaaaaa gacaatgcaa gaatgcagtg |
| 27241 | caatgaaaca gatcttcaag gatttattca ctggattcct ttcgtggaac atccatctct |
| 27301 | tcccaaggtg tctatgtgac tctgagattt ttccttttct cacagcactt caattgctgc |
| 27361 | agtaccctca aagaggcttg ctttagcttg ctgtttccta gaattaagat aaatgagtga |
| 27421 | ccccagggat agatggctgt ggttgtcatt ccaaacataa gcagcagttt gttttctcgc |
| 27481 | acagtaaaac atgatatttc tatggccatg cctataaaat acaagataaa gaggatgatg |
| 27541 | aaagatatca aaactttcat tgccttcaca tgagcttctg tgttggagtc tctcaatcct |
| 27601 | gtcacattcg attgcatctg cctgttgtgt ctccaaaggg aaatgattaa aaaaatacat |
| 27661 | gtaattaggg atagtgtaaa gaagaaaatg actcccagat ttagcaaaat ctgtttaata |
| 27721 | aagtattcac ttttatacat gttgagatcc cagactgtgt cattcttcRt tttataatca |
| 27781 | ttaagaatct tcgcaatgta tgcaaaatta agtaacgatg aaataagtaa gaatactatc |
| 27841 | atgaagggaa gaaccatatt tgttctgctc ttcaaccaga gaaatatgta gttggaaaaa |
| 27901 | tttgctatct tcaggaaata gaagatgctg aggctggtgg caaaccacat acttgattga |
| 27961 | ttaccaatta cccaaaagta actaatatat tcaattaggt taccggaggc atatatattt |
| 28021 | ggagagaata tctgtataaa tccatctgta attattatcc atatcagaaa aattcttgaa |
| 28081 | atagctaagc cggtgagaat aaagccaatc gtagataact tattcttggc acagtcaatg |
| 28141 | cagtttacaa gtccaataaa tccattcccc aaaaccccaa acactgactc actaactaca |
| 28201 | acaaaaatga agatgccttc cactacacgt agcatatctg ctaattctta atattgcttc |
| 28261 | tgttacatct atcttagatt acctgctgca gaatgaggca tatattggct gctcgacgga |
| 28321 | agtgtgactt tcttctcttt cattatataa agacttgaaa ttgccccagt aatggcttga |
| 28381 | gatggaatca gaaatttctt aatgaagacc tttccaaata tgtctacaaa acatagctag |
| 28441 | tctggagaat gtatgttcag actgaatgcc tatctataat ttgttaaaat gcaaatgaaa |
| 28501 | gtttctgttt catggatttt acatgtcctc ctgagactat tttgcattta ataaattgaa |
| 28561 | ttgtggagga ggagtgccaa acatatacct atagaatgta atgcaaaaca gaaacaaaaa |
| 28621 | ttttgacttt atcttttaaa atatcaaatc attatttatg tcatttataa tcaatttata |
| 28681 | tatgtacaga aaatactata tagaaatgaa aaacaaattt agccactgta gatacttact |
| 28741 | ctaaatgatc gatttaattt ttaattaaaa tttaagctca actctaggta tgacaagttt |
| 28801 | cacaaatatg tcacaaatct gttgctgttg ttttatactt atggttatta cacccttgaa |
| 28861 | tgcagaagat tatgttgact acccttgaca tgaaaggctc ttaggaataa tctcttcatt |
| 28921 | taacacatta ctgtttgctg gcacccattc atttatccaa caagtattta ctgaatgtct |
| 28981 | agatacaaca agctctcttt tgatctttga gggaatatag tggtagacag aatttcaaaa |
| 29041 | cttgtgtgat ttatggagtg tatattctaa tgagggaggt gggaaacaat taagtaaatc |
| 29101 | aacatactga tctaagaatt aaaagtgaaa ttaaaagtga aatctaacat ttattgagct |
| 29161 | tttattatat tcctagcgct atgttaagta tctttttctc atcttaattt cacaagcctt |
| 29221 | caatccttta aaagaggggc tatttttgta tttacattaa atatgaataa actaagcttt |
| 29281 | ggagaaaaga agaccttctc tcacttatcc tggcatgact accataaata aaattgcaca |
| 29341 | atgatttcaa aatgaagtta aattaagctt aggaatagac tacaaatgat agcaaaacaa |
| 29401 | aacaaaccaa ccaaaagcaa gtagaaaact taaattctca tgggctgcac atactgaaat |
| 29461 | tgacagataa gaatatgtat agataaatta gctaatgtat acactgttta caaaaaacaa |
| 29521 | gatgcaattt cagagaagag cagcaagaga ctgttagaaa gaaattggaa catttgggga |
| 29581 | aaaaacttct agaaatggag aatataatta tataaaatgt aaatgaacta aatactccaa |
| 29641 | gtaaaaaatt aatagtaaca aagaagaatt taaaactctg acYgtatact gcttacaaga |
| 29701 | aacacaattt aaatatagaa aaggaaaact ttaaagtaaa attatggaaa aataagccat |
| 29761 | gcaaacatca tccaaaagaa atctggcata attataacaa tattctataa agcagacttt |
| 29821 | aaggtaagaa gcagcattag agaagaaatg gggagtgtac tttatagtga taaaaatgct |
| 29881 | caaatctaca gaaaggtagg gtaatcccaa aaatttatga accaaataat ctaccaaaca |
| 29941 | tttacagaaa aggaaaaata agacaaatct acaatcacaa tgaaagactg taaaatacat |
| 30001 | aactcaataa ctcatcttag aaacaccaaa aatcaataga tggaaaatac atgaaaaaac |
| 30061 | aattgacaaa cttgtgttca acggtaaaat aattcatatt cttttcaagt gcacatagac |
| 30121 | tatttttacc aagactgatc atgaatccaa aagaatatct cacaagtgtt gaatgttctc |
| 30181 | tgaattcaaa ggaataaaat gaagttcaat aataaaaaga taactagaga aagaaacaat |
| 30241 | ttactaagac aaaaaacctg taaatactct tgagtcaaag aagaaataac aaaaattaca |
| 30301 | aaaatatttt taagtaaata atacaggttg tgtatccctt atctgaaatg tgtgagacca |
| 30361 | gagagctttg gatttcggat ttttttttct ttttttttaa gttttggaac atttgcatca |
| 30421 | tactgattaa gcatctcgaa ttcaaaaatt tgaaatccaa aatgttccaa tgagcatatc |
| 30481 | ctttgagcgt Matgtcagcg ctcaaagagt ttcagatttt ggagcatttc aaatttcaga |
| 30541 | tttttggatt agggatactc aacgtgtaat aaagaaatga cctattaaaa tttacataat |
| 30601 | ccaattaaag ccattctttg aaggaaattt gtagccttga atgcatcttt tagaaaggca |
| 30661 | gggtaaaaac agatgaattt tgttttcatc tcaagaagct agaaagctaa gagtgaaaga |
| 30721 | aaatagaagt caagaaatta tagtWacagc agaaatcacc gatagaaaag aattaggtac |
| 30781 | agtaatatac taatgttggt caaaagaaaa tacaaattac tacagtcctt agagatatca |
| 30841 | gaaatatggc ctgggtgtgg tagctaatgc ctgtcatttc agcactttgg gaggcccagg |
| 30901 | tgtgagaatc acttgagtcc aggagtttga gaccagcctg ggaaacatag caagacctta |
| 30961 | tctctactaa aaaaaataaa taaataaaaa taatttagca gggcatggtg gtgtgcacct |
| 31021 | gtagtcccag ctacttggga ggccgagcag gaggattgcc tgagcccagg agtttgaact |
| 31081 | tgcagtgagc tataattggg ccactgcact ccagcctggg tgacagagtg agacctcatc |
| 31141 | tctctctctc tctttctctg tctctctctc tctctctcta tacatacata tatatacata |
| 31201 | tatatatata catatacata tatatatata tataatacta tataatatag ttacatatcc |
| 31261 | ttgtatataa tcttttatta taagacaata ctgtgaacaa ctttatacaa aatttcatca |
| 31321 | agaatactta taagactatt acaggctaat atagcctgaa catagatgca aaaattccaa |
| 31381 | acaaaataga gtccagcgat atataaaaga ataattcatt ataacaaaYg gagttttaaa |
| 31441 | agccaattgt gagattaaaa tgaaataatt gaagatacag tcaattaaca caaaagaaag |
| 31501 | ccagaaaaag gacagaggga caaaaataag tgagataaat gaaaaacatt gagcaaaatg |
| 31561 | caagacttac agccaaccat actgataatt acattaaaca tgatttgact aaacactctg |
| 31621 | atgaaaagat agagatcatc agaatgaata aatgaaagca caattaaatg ttatgcctag |
| 31681 | aagataaaac attaaacata aaggcacaga tagattgaat gtaaaggaaa gaaaaagcta |
| 31741 | tactatggaa tttgtaacca tagaaagcag gactggttSt attctcaaag tggctatatt |
| 31801 | atcaagacaa gtagtagaaa aatagaggga agttgtataa tgataaaata ttcaatttat |
| 31861 | caaaaatact taacaatcct gaaggtgtat cagactaata attgtgactc aaaataaata |
| 31921 | aagcaaaatt aacagaacta aagcaagtga taggcatagc aaagatttaa aaaccccttt |
| 31981 | gctgtgatct gcatgtgtct cctccaaagt ctatatgttg aaacttaatt gccagtgtgc |
| 32041 | cagtattaag agatggttcc tttaggaggt aatgagggca gacctctcat gaatgagatt |
| 32101 | aatgaccatt ttgatgtgca ttctaggtat gttaactcta catgccttag attgtgcaat |
| 32161 | agtaactggg ctcttatgaa agggttttaa caaMttccac aagttctaga ctaatttctg |
| 32221 | cagttacatc agcagcaaaa atattcacaa aaacaatggt gccactgcat ttcagcctgg |
| 32281 | gcgacagagt gagactccat ctcaaaacaa acaaacaaca aacaaaaaac ataaagtaac |
| 32341 | tggctaaatc catattatta cagagacaag attgttacct agaggaaata agtggttttc |
| 32401 | attctatttt gcttacttct gttaaatttc taacatccac Yttctgtaga tctRaatgRg |
| 32461 | tggattacaa cttattcaca cctctttttt atatataggt gattattttc tctttaaaat |
| 32521 | attttaaaaa ctattttaga ggtcagtcct ggcccaggaa gaatttattt attttatttt |
| 32581 | atttatttat ttatttattt atttatttat ttatttattt atttatttat ttttgagaca |
| 32641 | gagtctctct ctgtcgccca ggctggaatg cagtggcgcg atctcggctc actgcaagct |
| 32701 | acacctcctg agttcacgcc attctcctgc ctcagcctcc ccagtagctg gaactatggg |
| 32761 | cacccgccac cacgcctggc taattttttg tatttttagt agagacgggg tttcaccgtg |
| 32821 | ctagccagga tggtctcgat cttctgacct cgttatccgc ccacctcggc ctcccaaagt |
| 32881 | gctgggatta caggcctgag cccgcacccg gccaggccca ggaagaattt aaatggtact |
| 32941 | tactcagtga cacaggacat atacaaaaaa agagtacgat gaagcaagaa agattacacc |
| 33001 | aagacttctt gttgacttct ctctgaggcc tacctgtgta gctaagagtg cccgtccttt |
| 33061 | caggccacat ttcaggtgcc agagaatccc caagaaagtt ttcttcattt ggccgtatcc |
| 33121 | aaaaatcaca acatatgagt gacccaaaga atactgactt catatcataa accagatatc |
| 33181 | acaaccagtt tgttctgtag caaaaaatac ccctgtaaat gtcaagaaaa gggcaaattt |
| 33241 | ttatagagca acaagacaaa aaaggaaaac cgttttcttg gctctgaaat gggcccgtat |
| 33301 | actggggttc tgcaatccct gaaattgaac ctaatgtgtt tcatgtgtct tcacgaagaa |
| 33361 | aggagtaaca acaaaaagaa aatcgaagaa atagagaaag aagagagaga tccaataaag |
| 33421 | aagattatta tattattaac atttttatta ttacttacat tgagtaatcc agtcatatgt |
| 33481 | ctttcatatt tttttggaca cgataccaga agacatcaaa agtgtacgtc aaaggaaagt |
| 33541 | tggtaaacag aaaaggcaga taccagtgga agtatgaaag ctaccttgtt aattctccat |
| 33601 | tttagccaaa agtaaaagag ataggagaaa ttgacgatct ttaggaaata aaagacagca |
| 33661 | agacaagtag caaatcaagt gcacaagtgg ttggccagtc tccggacaat ggtaaggata |
| 33721 | tggtttcttt ccctagcatc agggattttc taatagaaga atattgattc tggctaaggc |
| 33781 | caaactagta agaatgaagc caaccatgca taacttctga tttctcatcc aggcaatgca |
| 33841 | atctgtgagt ccaatgaatt aatttcctac attcctttta taaatcccct acctattaca |
| 33901 | gtcatgaaaa cctccaatat attcaacatg gctacaaagc gaaaattctg atctgcagtt |
| 33961 | tgttgtgtga ctaattttca gatgacttac tggataataa catagatctt atgtttgatt |
| 34021 | gtgcagtgtt tttattttat catggctttt ctttttagct ataaagttta gcaaactgca |
| 34081 | gtaagacagt gaaatcactc tctgtaacat tcattgaaaa tttctaacta cctctgctaa |
| 34141 | gaatttccag tcttggtcca gctgtcagct acaaactgta aatttcttta tagaaagatg |
| 34201 | atcacactct ggggactgtt gtggggtggg gggaggggga gggatagcat cgggagatat |
| 34261 | acctaatgct agatgacgag ttagtgggtg cagtgcacca gcatggcaca tgtatacata |
| 34321 | tgtaactaac ctgcacaatg tgcacatgta ccctaaaact taaagtataa tttaaaaaat |
| 34381 | taaataaaaa taaaaaaata aaaacaaaat taaaaaaaaa gaaagatgat tgacaaacca |
| 34441 | aattatcatt tgctaacatg taaataaaga cacagactaa ttttcattgt tttgaataaa |
| 34501 | attagttctc ctcttccaat gaagtgtttc atttgattta caaatctgaa gtttgaaaca |
| 34561 | gaaacctttc accacattaa aattattcaa catgtaggga aaaccagcaa tccttatgct |
| 34621 | aattaattat aatgcagtca cagtgtagat tgctacatta caaagtaaaa tacagagctt |
| 34681 | gaaattttca agaaacttgg tgggcaatat atgaatctaa tatgagtatc ataattatca |
| 34741 | ggaaaacttc ccccaccgct ccccaccccc cactataaag atgcaggcct ttcaaataat |
| 34801 | ctgtcagtag cattttaaac acatttttaa aaatgatgtc tttcagtgaa acataagcac |
| 34861 | cccaaactaa acatggaaaa agtgaacttc ttttgtttcc tcaaaaacaa gattctagca |
| 34921 | ctttgggagg ctgaggcagg cggattgctt gggcccagga gtttgagacc agcttgggca |
| 34981 | acgtagcaaa accccgactc taccaaaaat acaaaaatta gctaggttag gtgtgttggc |
| 35041 | acacgcctct gatcccagat acacaggagg tggaggtggg aggatcacct gagcccaggg |
| 35101 | aggttgaggc tgtagtgagc cacgaaaaaa aaaatgtttt ttttgagata Waagagtctt |
| 35161 | caaatatttc cacagaactt tgttaaggtt acattgtctt gaggggaaaa tgcttaaaaa |
| 35221 | gtcatgaata tacttaggat gatctgttat gtgtatatcc atatacacag atataggtac |
| 35281 | atatatggct acatatacat aaacatatac atgtatacaa atacacacag acacatctat |
| 35341 | ttatacacac attgtactgt gWtttgtcct ctacttctct gtattttagc ttgtctggtt |
| 35401 | tttgttactt ggattgcttc tttttttgca ttattttatt atttttaata aacgcaataa |
| 35461 | ttgtacatat ttatgtgata cagtgtgata tgtgaataca tttatacaat gtgtaatgat |
| 35521 | caaatcaagg caattagcat atccgtttct caaatattta acatttcttc gtgttgggca |
| 35581 | cattcaaaat ttgtttttct agctcttgta aaatatacaa taaattgttS taattgtagt |
| 35641 | caccctactg tgctatagaa cactagaact tgttccttct acctggctat acttttgtat |
| 35701 | tcattaacca acctttggct atctccctct cccttctccc ctatcacatc tctaggaacc |
| 35761 | attattctgc ttcctacttc tacggaatca actttattag cttccacata tgtgtgaaca |
| 35821 | tgtcatgttt gtctttctgt atctggctta tttcacttaa cagatgttct ccagtctcat |
| 35881 | ggatgcttcc ataaatgacc aaatttcctt cttttaatgg ctaaatagta ttccattcat |
| 35941 | tatgtgtata tatcatgttt tctaatccat tcaaatgtta atggacactt aggttgattt |
| 36001 | catgtctcgg ctattatgaa tggtgttgca aaacacatgg gagtgcagat atcacttcga |
| 36061 | catattgatt tcctttcctt tggatacata cccagtggtg ggattgctga atcatatggt |
| 36121 | agttatattt ttagttttta agaacttcca ttctgttctc cataatgact aaactaattt |
| 36181 | atatttgtac caacagtgtg taaaacttcc tcctccacat cctcacaagc atttgtgttt |
| 36241 | ttttgtcttt ttgaaaatag ccattataac tagaataaaa taatatctca ttgaggtttt |
| 36301 | tatttgcatt tctctgatga ttagttatat tgagcacctt tttatatacc tattggccat |
| 36361 | ttgtatgtct tcttttgaga gatatatata cagttaattt gcccatgttt taatctaatt |
| 36421 | atttgtgttt ttgactgagt tccttctata gtctggatat gaattccttg ataaatgaat |
| 36481 | agttttcaaa tattttctct tattctagag gttgtatcgt cagtctgtcg attgtatatt |
| 36541 | tgtgtatgct tttatcaaat caacataatg taaactaaat gagataaagc taaaatggtc |
| 36601 | atcgcttgct taacataaaa tgcattattc atctaatttt attgttacta ttatataata |
| 36661 | ctataatttt aattttgcca ttgattatat agttgcaatt ctgatggaaa cagtgaaatc |
| 36721 | actttctttt aacttatttc aggcagataa tttcatcaat gaggctcaat gatctatcac |
| 36781 | caaacataat aaaagaagtt ggattaaatg aaagggatgt gtgctgagtt atttgttgtc |
| 36841 | ttcatttttg agagaattac caatcaattc aggtgtgttt atgaggattt agatttcctt |
| 36901 | atattcatgt aacaccgaag gttcctcagS acacagagag aagcctgttt cagtttgctg |
| 36961 | ttccataaaa tcagaaaaaa atgaatgact gaatagatag aaaaatgcta actcaagagc |
| 37021 | aaaaatctgt gccacaatgc tatctagatt aaaataattt cgctttataa tcgtattgct |
| 37081 | caaatagtat ataataaaga ggagcaggaa tgaaattata gatattaggg gatgtcaaac |
| 37141 | ttatccttgc attcttattg tacaaaattt cctcagttta catttaagcc cacatgtaaa |
| 37201 | attacagcag aatattctgg aaattgccca acaggtgaga ataaaatcta tcagggagag |
| 37261 | tttccagcgc ctgatccaat caatgcagtg aaccagcacc ataactctac ttctctgaat |
| 37321 | ccccattatg aaatctatag cagaaatcat tgtaagcata ttcttcaaca tgtttgccat |
| 37381 | gcttgattat gggatctctg ctttctgtac accactgatt tataaataag atgttataaa |
| 37441 | tttgtgtatc caaagcttta gtgttcaata tgtttcttta tcctgtgctR ttgattgaca |
| 37501 | ctggaaaaga atggaatgcc tccagtgtgc tcccagacaa agtcctagtt gtctttgaaa |
| 37561 | aacgaaaact acctttattt ttctcagaat ttcagctagt gattttcaag gcagatatta |
| 37621 | tattacctgc tgttgtgaca ctgtttataa tttccttgta aagctatcaa ctaggatttg |
| 37681 | aattctgatt tgttaaaata caaaatagag attttaaaat attttttgca tctttttttc |
| 37741 | cttaagattt aaatgttttt tattcattca ccttagttat aagctagaaa cattaaaata |
| 37801 | tggtgtcttc atggatctcc tgagaagcaa ggcagtcatt gggataaatg cctatatgag |
| 37861 | aaagcaagga gagagcgaaa ggtgaacaga gctattgtac taggatataa ctttgacccc |
| 37921 | tgtgaaggag agagagaggg aaagaaggaa ggtcttaggc agcagtgcag tcctgagaac |
| 37981 | atttcaagat gtccagtagg gagttatcaa gcccaaggtg caaattagag gagtcctgag |
| 38041 | tctcccagga gcaggcctga ccattgaatc tgcccccttc tctgtctttg gctgaaagcg |
| 38101 | gctcatggaa gtgaatgggg tgatagattt catagcatag gtgccatgct tgttagctgt |
| 38161 | tggggaaata cgattaaaaa caaagtctcc tcccaaccca gaaagtctct ccacaaatgt |
| 38221 | aatagagaaa gaaaatagtt ttcttattaa ataaatatta aaccagaatc tgatatacat |
| 38281 | tacaggcaac ctactaagag actgcaaaga cagaaagaga tctcacccgt ttttatatag |
| 38341 | ccaatatatg catatgaccc aatatataca ttttctcaag ttaagtgata actaatcccc |
| 38401 | aagagagagg acttggcagc attatttatt aYgcatagtt tatcttaaat ttacctggaa |
| 38461 | attggggtgg ccatctgtgt tagttaacag actttaaaca aaggacaaat aaacacagat |
| 38521 | ctttatgtag gagatagtct tgccatttgg agcctggtgg ccattgaagt taggctcctg |
| 38581 | ctcccagcag aaactgagag ataagggtgc ttatttgtaa aagagatgat taagcttctt |
| 38641 | tatttttagt gtgtatttgc ccttctgcag ctaattgtgc tccctcaRga cagagatttc |
| 38701 | agaggcacat tcctatcaca tgccacaaat gtctaaaatg acagtttatc ttcttactca |
| 38761 | cctcgccaat acatattatg tataaagtac ccaaggttta agtaaataca caaaatctgc |
| 38821 | tttctgatac tatatcagga tcgcttagag tctgtggcag ttttgaaaca tggctgcaaa |
| 38881 | ctctttgatc ctcttccttt tgaggcctag ggtctgcaga ccttcctctt aaaactgagt |
| 38941 | gggcttgtaa ctgctttaaa caatgacgtg tggtggaaac gacatcatat actttctaag |
| 39001 | gctatcaaga aaaactgtat ggcttttccg ttactcactg gaaagtttcc tcttacaatc |
| 39061 | ctgaaccact tcataagaag tctgacaaag ttgagaccag catgctgtga ggaagctcaa |
| 39121 | gccacacgag gaggccacat gtaggcaata tagtcaacca tttcaaatga gcccgtactt |
| 39181 | ctgatcatcc aagtccagtg atagacatga gagtaaaggt ctgcttggtt attgcagccc |
| 39241 | ctgccacttg agtcatagtc cgctgtctac atattctaag gtgaaggtct agacattttg |
| 39301 | aagaagagac aagccttctc atagtgccct gtctgaatta ctgacccaca gaatctggaa |
| 39361 | gcataataaa gtactgttgt tttacaccca ctagggccta ttggggtggg ggttggggga |
| 39421 | ggaggaacat caggaagaat agctagtaga tgttgggctt aatacctagg tgatgggctg |
| 39481 | atctgtgcat cagaccacca tggcacatgt ttaccaatgt aacYgcacat tctgcacatg |
| 39541 | tacttcagaa cttaaaagtt gaagaaaaaa tacacaaaat aaaataaaat aaaatattgt |
| 39601 | tgttttgtat ctctgagttt tggactcagg gtgttttaaa gatcaatgca taactaaaat |
| 39661 | agaattattt agcacataca taaggaaagt cttttactag cttagttttt attttcttag |
| 39721 | catcattatt tatagtagcc aaaagataga aaaaaaccca aatgttcatc aatgaataaa |
| 39781 | taaatagaca aaaggtggtt tagtcatgta atcaaatatt atttaactat taaagggaat |
| 39841 | aaagtactga tacgtacaac atgtatgagt cttgaaatta tgctaagtaa aagaaaccaa |
| 39901 | tcacaaaaga tcccatatta tataatgcca ttcagtcgaa agtccagaat aggaaaatat |
| 39961 | acagatgcag gaagaagatt aatagatgct taggctgggg tggggagaaa ggtgggatga |
| 40021 | tgggggaata gggaggtgat atctaatgga tatggggttt ctttttgaag tgataaaatg |
| 40081 | ttctacaatt gacagtggtg atggttgcac atgtctgtgg aatatattaa aaatcattta |
| 40141 | attgaacact aaatgagtga attgtatatt atgtgaacta tatctcaatt aaagcattta |
| 40201 | aggcaaaaac aagttacata tgacattttt ccttatagaa tatgtaacat ctgtgtatat |
| 40261 | ttttcataat tttattatac cttgtagtaa cactattagc tcagtcatct ttaattctgg |
| 40321 | tgaggtataa ataaaatacc aaaagcttta catcatttca cttttgttga ctattactta |
| 40381 | ttgagaaact ttttactctt tggatgagac atgataggat aggctatgct gtagcatcta |
| 40441 | caatgtaagt ttcatgaaag gttcatttct cggttcacat tacatgacta attgaattta |
| 40501 | aaaatgcaga gtgaggtgag gatagttttc atgtagtctc tcaggaatac aagctagtgg |
| 40561 | agtatctaac actaaacatg tgtctttcaa gtccctcact taggaagaaa agagacacga |
| 40621 | agagccttct tttacatatg aatattcaac tgttccaaaa tgattagttg aaaagataat |
| 40681 | cctaatcttt ttttttcagt ctttaagtgc tcttttcttt tattctcagc cccctttatt |
| 40741 | gttattatta ttttcatttc attattatta tactttaagt tctagggtac atgtgcacaa |
| 40801 | cgtgcaggtt tgttacatat gtatacatgt gccatgttgg tgtgctgcac ccattaactc |
| 40861 | gtcagatttt atgtttcttt atcctggctt gataaaaccc attgtctcag gacttttctt |
| 40921 | ctaaatagaa aagtagtctg aaggctcgtc ctgattcatt ttaagactgt agtatttctc |
| 40981 | ttctgccagt taatatgttt tcactttttc tattttcttt ttatatccaa tacatttcag |
| 41041 | tatgaaattt tgtgatggtc cactagtctg atgtgcacaa tttagccagg aataaatatt |
| 41101 | agtggattca aaataggcac tcaaactatc tgtccagatt ttttaagtgt tgttggtttt |
| 41161 | tttctttctt tttttttttt tttcaaattt caactgatga atgaaagtag ctgcctagag |
| 41221 | aataatgagg tgggtgccaa acctgggttc attgaaggcg ttatagcacc tgtgccatgc |
| 41281 | tataacttag ataagtgacc ttatctaagc ccatggcttc aaatgccact gaaactggtg |
| 41341 | aatttatctt ttaggaatgg aagggctata gagatatttg atgaaagaaa actaagagga |
| 41401 | tttgtcacca gaacatctac cttttaaaag ggggctaaag aaaattctct agccaagaaa |
| 41461 | aataaaaaag aaagtttcaa acaaaaagat taaagaaaac acaatggaaa ggaagaatga |
| 41521 | ataaattcat cttccttttc ttcttcagtt tggtaaatgt atttgacagt tgaagttacM |
| 41581 | attatgacat tatcagctgt gattgtaaac ttgatttcag taacatttga agccatgggc |
| 41641 | ttagacaagg tcacttagga atagtgtaga tatcaggaca agtaagacct ctgagacagc |
| 41701 | catgtgggaa ctcgacatag caagcaagcg atggggagcc ccacccagtg actgtcttca |
| 41761 | ctctagcagc tctcagtgaa ggcttctgta ttaggccatt cttgtgttgc cataaagaaa |
| 41821 | tagaggggcc ctgcatggtg gctcacacct gtaatcccag cactttgaga ggcagaggcg |
| 41881 | ggcggatcac gaagtcagga gattgagacc atcctggcca acacggtgaa accctgtctc |
| 41941 | tactaaaaat acaaaaaatt agccgggcgt ggtggcgggt gcctgtagtc ccacctactc |
| 42001 | agcaggcaga ggcaggagaa tcacttgaag ccgggaggtg gaggttgcag tgagccaaga |
| 42061 | tcgcgccact gcactccagc ctgatgacag agcgagactc catctcaaaa aaaataaaaa |
| 42121 | aataaaaaat aaaggtaatt aataaaagag atttaattag ctcatagttc tgcagggtgt |
| 42181 | acaggcatgg cactagtatc tgattagctt ctgatgaggc ctctggaagc ttacaatcat |
| 42241 | ggcaagaggc aaagggggag gaggcgtgtc acatggtgag agtgggagca agtagaggag |
| 42301 | gcgccacaca cattcaaaca accagatctt gcatgaactc agagcaagaa ctcactaatc |
| 42361 | accgagagaa tggtgttaaa ccaggagtgt ccaatctttt ggcttcccta ggccacgccg |
| 42421 | gaagaaaaag aattgtcttg ggccatacaa aaaaatatac taacgatggg tgatgagcta |
| 42481 | aaacaaattg ccaaaaaact caatgtttta agaaagttta tgaatttgta Ytgggtcata |
| 42541 | ttcaaagcca ttctgggctg catgcagaat gctggccatg tgttggacaa gcttctgcta |
| 42601 | caccattcat gaggaatctg ccccatgatc caatcacctc ctaccaggtg ctatcacaac |
| 42661 | atcgRgaatc acatttcaac atgaggtttt caggggacaa acatccaaac catatcagct |
| 42721 | tccctgtgcc aagcatggat ggagctgaga gctttatatg ggttacttac aaaatataca |
| 42781 | tgttttatac aataatatta atagtacaaa ataattactt tgtaccaaaa attaattgta |
| 42841 | caaaatatta aaatatttaa cataacattt gtacaatgta tataaaaata taaatatccc |
| 42901 | ataaaatttg ataatagcat atgctatttt atttctataa tatagacact cttcaatact |
| 42961 | cagcaacttt gttcacatta gaccactttt atttgtaatt attgatatgt tgggtcacaa |
| 43021 | acctgccatt ttactttRtg atttctgctt atccgttttt ttttcttttt ttgtaattgt |
| 43081 | tgttttgtac gccttgcttt catgtgtgtt actttaattt tcttttttta gaattccatt |
| 43141 | gaggtttatc tgtggtattt ttgagtatat ctctgtgtgc agacatctta gtggatgctg |
| 43201 | taggttttac agcacatgta ataacttatc atggtttaat agggtcaaaa ttttagtact |
| 43261 | ttgaaagatg tacggaaacc ttattccttg attccctata tgtctcttta ccctcctctg |
| 43321 | ttccttatat agttgtctta aatatttacc tatatacact taaaatcgca tctgataatg |
| 43381 | tcataatttt aacttcagct gtcaaataaa tttaccaaac tgaagaggaa aaggaagatg |
| 43441 | aagttattca ttttttccct ttccattgtg ttttctttaa ttttggtgtt ttaaagtttc |
| 43501 | ttttttaatc ttttttcttt ttttttttcc tggatagaga attttcttga gccccttttt |
| 43561 | aaaaggtaga ccttctggtg acaaatcctc tcagctttct ttcatcaaat gtctttatag |
| 43621 | cccttccatt cctaaaagac aaatatacca gatataaaaa ccagaattga aagttatttt |
| 43681 | atttcatcac atagacagtg ttgtgccact tttctatggc tttcatctat ttctgatgtt |
| 43741 | tcctgcttcc atttgtattg ttttctctcc tatagatgag ctatttcctc tagctgcttt |
| 43801 | caaaatttgt tctttctttt aattttcaga tattttacca tggtatacct tagtttggat |
| 43861 | tctttgtgtt tgtcttggtt agttttatgc actgaaagtt tgtgtcccct caaaattcat |
| 43921 | atgtagacat cctaaattca atgtgatgtt atttggaggt taggcctttg ggaggtaatt |
| 43981 | agggttagat taagtcatga gggtggggcc ctcatgttga gatcagaggc cttataaaaa |
| 44041 | aaaaaaagag agagagagag ggagaaggag acaagagata tctttttctt ttctccaaca |
| 44101 | tgtgaggata caatgagatg atgtccatct atagccaaaa aatgtcttca gcagaactca |
| 44161 | tctgtgctgg cattctgatc acRgtcttcc agcctccagt attgtgagca acacattttt |
| 44221 | gtttttataa accacccatt ctatggtatt ctgatacagt agcctaaaat ggctaagaga |
| 44281 | ttttgggttt gcttgaattt aggaatctgt gggtttttgc ctattgccaa attaaggaag |
| 44341 | ttttcagtct ttgagacctt tctcaaagtt gcccatttct tctctccttc tgggactctg |
| 44401 | ataacacaaa aattaggcct tcagttataa tactacaggt ccctgaggct gtgtttatag |
| 44461 | ttttttcctg cttaccttca tgaatttttt atgtggttat tgtaagtttc agttctaaaa |
| 44521 | tgtccattca gttctttcat atattttaat tttttggctg agataatttt taaatttgtt |
| 44581 | tcatatatgt ttgtaagcaa tatactggaa gcatttttat gatgactgct ttaaaatatt |
| 44641 | ttctgaataa ttccaacatc tttgtcattt ttgttctgga atcttctaat taccttttac |
| 44701 | attcaagttg agatttttcc tggttctttg tataccaaat gatttctaaa tgaaccagga |
| 44761 | cattttaggc attatgagac tctagaactt atttaccttt tctgtcttag ctagcttcct |
| 44821 | cagacactac tccagcaagg caagggagtg agggagggac actgcattac tgccaggtga |
| 44881 | tgatagaaat aaaggtttcc tctcaatctc tgttgacacc taggcaggcg gaggttcctc |
| 44941 | attactgctg gctggagggt ggattctggg tcaccactgg gcctccactg atagcctgtc |
| 45001 | tcggaggaag aagtgacttg ttactgtttc ccacatggcc tccacaagca ccacctggta |
| 45061 | tggaaaggag ggtgcttctt cattgctgct tttagagtag atccagctcc ccatttgctc |
| 45121 | tccagtcata tcaaggtgtg gaaggagagt gaggggctta ttaccacaag ttggggatga |
| 45181 | aagttccaac ttctgctatt ctgagatact attctggagg agggttggga caccttgtca |
| 45241 | cagcctggct ggtatgaaga tctaaagatc taagctcttc acttgaggta atagtgtttt |
| 45301 | ctgtggtact tgactacagt agagtggtta ttgtcgaaat gttttctgcc ttggtagact |
| 45361 | atttccttga cctttgccta aaataatagg cttttgttgg gaaattctca tatgtgcctg |
| 45421 | ttagtatttc tatgttgatg gcattttcag ctaaaagtct gcaaattata aagcagaaaa |
| 45481 | gaaaacttag aggattcatc actatacaat ttattaagtc cctaccacat ctgccttggt |
| 45541 | ctctccaggt ctgagttttc atatatttta tatataatgt tcagggttta tagtttttct |
| 45601 | tagtagaagg aatagggcaa aatacattta ctccattttt ctggaagcag aaattggttt |
| 45661 | actttctgta agaaagcagt tggtgaattt ctgtctaaat tctctgcctt ttcaagagga |
| 45721 | actgggcttt acttctcaga taacaactga gcaacgatag acctacaggt ggcattactc |
| 45781 | tctgtatagg tagagaatag gctgaatatt aaatgttaag gagcagaatc attggaattt |
| 45841 | aaatgaggaa ggagacttag tttttattca cgttaaccag ccacctgatg acatgcaaca |
| 45901 | gtgcgtttgt tcatcaacat accttttaga tggcctttct gcttcttttt tgaatggctt |
| 45961 | taatgctaaa gaaagcaagt gtttatcaaa taatctattt tttagataat tcattattag |
| 46021 | aagttaattc attattagaa agataattta ttattagaag gtaattcatt attagaaaga |
| 46081 | acaaaacgag tcttttttaa taaaagaata aataaattta aatgtattga acttttattg |
| 46141 | ttgtatgtca tgtagggtaa ttttgtatac atgttgcatt ttacaagact taaatcgtgt |
| 46201 | aattttatat acatcttgta gggtaatttt atatacattt tataaggtaa ttttatatat |
| 46261 | attatgcatt Waattcttgt aagtagccct ctgccttagc cagttcgagc tgctattaac |
| 46321 | aaaatatctt atcttgggta atttataaat aatataaatg gatttgtcat agctctggag |
| 46381 | gctggaaagt tgaagattga gatggtacca gatttggggt tgagtgagag cccattccaa |
| 46441 | acagacaatt tctcctggct tctctctcat gaggcagaag tatgaaagaa acatgaacat |
| 46501 | tgagtcccta catgtcaaaa gagatggaac agctcagcag cctttgggag cttctttttg |
| 46561 | tagggaaatt gatcccattc atgaaagcag agtccacacg acttagtcac ttcccccaaa |
| 46621 | gactccatct cttaatacta ttgcataggg aattaagttt caacataaat ttattttgta |
| 46681 | gagacataaa cattcaaact atagcattct gtccctggtc atcccccgaa atatatggtc |
| 46741 | ttctcacata ctaagtacat ttatttcatc tcccaaatcc caaagtctta actcattcca |
| 46801 | gcatccactt taaaatctaa atccaaagtc ttatctaaat atcatcaaaa tcagatatgg |
| 46861 | tgtggccaat tttctaatat tgaaccatct ttaacatcct catcctcttt caacgtggtt |
| 46921 | tattattctt ttagcatact gttcgtttgt ttatgtacta ttgaatagtt tccctaacag |
| 46981 | agtatccttg ctgtcctata tattttgttt aatgaaactc agaatgaatt cagaaacttg |
| 47041 | ttgtttcctg tacttaaaaa atctaaaaaa gaattatgtg ctttttaatg ataaagatta |
| 47101 | gatattaaaa ttttctgtat tcagcgacat tggaggtgat aatgagaggt agctggagac |
| 47161 | agttacatat caaattcttt tgcttcttag ggttattttc tattcaactt tgcctcagca |
| 47221 | acttgagtta aatttggtag tctatattat ctgacaataa tactgatatt gctggaattt |
| 47281 | ttacaatcag aacagagttt tactcaaatt tcttgccctt taaagtacat tatgctgcac |
| 47341 | cctttatgaa atccactcaa gtttttaaaa agaatggtga acgacttagg gaggaagaga |
| 47401 | gctgagcaat gaaaaaagag gagaaaagag catagtgagt tttatagaga agagatctag |
| 47461 | aactacattt atgcccctag aaaccaggat taatagtttt ggaaatttta agaattcccc |
| 47521 | agcacttgca actccctctc atttgttata tattccttgt tttcctagag ttacaagaat |
| 47581 | atcaatgaaa gatgtaaaaa taattttaag aatttgcatt tgtgctatgc aatctaggac |
| 47641 | agaaggggaa caatggaact ctttctcctt ggcagctggc tttattaaga taaaggagga |
| 47701 | gggaagcctg ctggaagcat caatgagcaa gagtcccaga tattcttaga ttgtattaat |
| 47761 | ggccctcaaa ttctagactc agaaacaccc acaaagagaa gcaacaatca gaaattgcat |
| 47821 | gctattaata ttttattggt atactgaaga aagagttatg accacattat ttcaatgtca |
| 47881 | tggctttctg aaggaagtta tcttcttatt tattttctga aacaaaaaaa aaaaccaagg |
| 47941 | aaatttatac acaacataca acatggcaaa acttatctaa ttccttgatg atattactga |
| 48001 | agtaaattat tgctttcaag attaagaaaa cagatttttt tatggtgttt atgttttggt |
| 48061 | tactgttcaa aacattcaag gttatattta tgaaaatgac tgcaacttga acctgtagta |
| 48121 | gtgaaaaact aatacaagcc tacatatcaa ttaacagtgg ttgactgagg aaatcatggt |
| 48181 | acagtcacac aagagaatag tatacaattg taacaacaaa agaaaaatgt acaaataaat |
| 48241 | caccaagaag atctataggt ctccgtgaaa tgataaagtt gtctaagaca tgtattattt |
| 48301 | gaaataagca aatacagatc tgcatataaa ataatatgtc atttgtggga aaaataatga |
| 48361 | cgtatgctta tatacatata aatatttcca ggaggatgtt caaaaaatta agggtggtga |
| 48421 | cttttggtga agggtgtggg taagtaggat aaggcgtcac tttaagattt agcttcatac |
| 48481 | cattctgttc agttagattt ttttttcctt gagcatgtac taatttcaaa ataagtattt |
| 48541 | taaaaattaa ataagatata agagcatcaa gttcaagtat catttagcag ggacactgga |
| 48601 | cctgagaggc tagtgtgagg caggactgag caaagagtcc tctggcggaa acctgagaga |
| 48661 | aacctgagat ggagagtcct tgggtttgag aaggcagact caaagacagg aggcagagca |
| 48721 | ccaaagggag agcacacccc acttcctcat taccaactca ttttaatgag acaagtcatc |
| 48781 | ttaagaaaaa agttggggag gtcagtattt caaaagataa gaattctttg aaccacttgt |
| 48841 | taaaaataca aggacttgca accttatcca agaatatctg aatacaaatc tttagaaatg |
| 48901 | gggtccagga ttatgtaatt tcaacatatt tccaattgat ttgtgaacac gataaagttt |
| 48961 | gggaatggta gcagtttggg catttaatgg agaatgaact ggaatcatac ctgccactga |
| 49021 | attctagatt accagagtgg ttgctcctgg ggatgtcttg ctggtctgtc cctcYggaag |
| 49081 | aatgatgatg cttcctgcag gctgacagaa ggaaatcggg gtagagagag ttgacggtgt |
| 49141 | cctcgtYggg gtggtcgttg ctgattttga aaaggaggtS ggggaggatg gcggtgatgg |
| 49201 | cctcctggtt ttggtggtct ctgctgagga ccatcatctt ggttaccact atcaccaggg |
| 49261 | ggtctaggta ggagtccttc aggaggaggt ctctggggtc cctgatctgg tctctgactt |
| 49321 | gagtcctcta catctgtgtg agtaattaat ggacaagaat gcatgagctc agtgaagaaa |
| 49381 | aactctcctc tctttatact tctctcacct taccacacag ccctgttctc cccaaacctg |
| 49441 | ctgcttgact gtcaacttct tttgtgccca ctgttttttt tttcttttta tgcagctctc |
| 49501 | aacttaatcc atgtaagagt gatatggaaa gtctcattta tttgctcctg tgacaagtat |
| 49561 | gtttccttaa atgaaaagag gggttcttgc atatcttaga gttgccagag gatgtctcca |
| 49621 | aggacagaaa aaaaaaaaaa agcaaaagca ttatagcttt cagttatgtt actggttatt |
| 49681 | ttttattttt attttttggt tgctgtaatg acttacaaac tgtgactcca tctctgggca |
| 49741 | cctaagccct atgtggaaac tagagctgat ttcccaggct cctggaacca agtagagaaa |
| 49801 | tactaagaga cagaagagaa agacaatgtg aaagcctgca catgatcact aaacagctgt |
| 49861 | ggcaactatt tatcatctgt agtgacacag ctgagtgggt caacacagag aaaagacatt |
| 49921 | catgcagtga tttttttgtt ttgttttgtg ttactccctg aagccacata accgtgcggg |
| 49981 | ggaacactgg gggaagaaag aagcagttaa ggatggagga gtcagaatga gaacacttct |
| 50041 | catttgttca tcatctctca gcagtcattc cagcctggga aaaaagcctg cccactccta |
| 50101 | ttgtcctcaa agccaggcat ctctgtattc aagttggtgg cctggctcat ggtccccaga |
| 50161 | atcaaagatg ggtaagaatt gcctatatat ttaggggcac taatattaat caatgcctga |
| 50221 | cccctcttac cacctcctcc caaaaaaatg atgagaagaa gacactgaag gaaactaaaa |
| 50281 | agaaattcta gtggaaaaag Raagaaaaga attggattga ggatcattgg gatttacctg |
| 50341 | gtatggtgaa agtaaagtct tcatagttca catctaggaa aagaagcaca ggatgaagtg |
| 50401 | aacattacct cataaatctt tcagggctca tagtggtcta tagggaaagg ggtcttctgg |
| 50461 | ccacaccctg tgcatcccct aagttacctc atcaaccatg ttctgtgaag ctgctggaag |
| 50521 | gggaggaaga tgttagggga ggcaggattg ttactatcgc tgagcatcaa ccacgaattc |
| 50581 | aatagaagag tccctttttg tcatccttag gatccctcaa accctaatgc taatttaggc |
| 50641 | acacttctct gggtattttc atgtcatatt ttagatcttt accttcttcc ttctttaaat |
| 50701 | attttgatca tattcacaag cttgcccaag aggagcaacc aggagtaaat atttggatat |
| 50761 | aatcttacac atRctgcctg caacatattg aaattttaaa tgtgattgga agaaaaatgg |
| 50821 | gaatttgggg acctgatatt tctataccac tatgtagaaa gacacaaatg tattatccag |
| 50881 | tcctctatgt ctgacagtac tctgatgttt gtttatctct ttcattgatt ctgcatcccc |
| 50941 | tgtacagcaa ggacaccatc atcgctgtcc actgagatta ctgtagcatc ttcatagctg |
| 51001 | gacttccctg gatcagtctt gcattctcca ctgcatcctt cacagcacag ccaggtcttt |
| 51061 | ctaaaaatac aaatcttact ttgtcattcc tctaattgaa attctctatt gggttccaag |
| 51121 | tgtatatcaa ataaagtata aggccttggc atggaatgag ggcacaacag atgtcatcct |
| 51181 | tggaatgaga gctccaaagc cctacccttc ttctcaacct ccttcctccc ctcctgctct |
| 51241 | tcYgctgcag tggtgtaggg tgaacccctg aggccctaga agagtcatgg cccctcatcc |
| 51301 | cactccccat ctcctttttt aaaaaaataa tttttttacc attatctgtg ctctgagctg |
| 51361 | agctcagagc cagaaggacc actgagagca ggaccagcag catcttgaag gaggctctgg |
| 51421 | agttgctccc aactctgcgt tgagagaaac atggcagctc cctttataaa catgagcaga |
| 51481 | acaatggcac ctttgagctc catactgggt ggacctcacc acctgaaagR ttaggttttg |
| 51541 | ctttcctctc ataaagttga atgcgtctct tattactttt tgggatttta gcccagcagg |
| 51601 | atgtggtggt aggatgtggt taggtacaaa ctgtgacttg agcatagttt ctgaagaaac |
| 51661 | agtatccaag caatcagcac aaatactaca attgaagttt ggtcatcatt tgattttcaa |
| 51721 | ttgggttaga cagttagtct ttccccttca ttggttgtct gtgtgcacac gtgcttacgt |
| 51781 | ttgtatatgt ttgtcagcag tgatcttata gccagaagtg aaaatgatta atatctctag |
| 51841 | ctattagtgt agcataaatt ccatttttat agcatatata cctatatgga tgatatgtag |
| 51901 | cttaatttca taataatata gagatcattt ctgtttaatg ttgagttgtg tgaggacaac |
| 51961 | acacacttgg gcacacgtgg atgacagaag ttttaccctc aggctactct ggcccaaaga |
| 52021 | gattaagatt ctcctaatct agcattaacc agagatactt tattgttgta gaacacaggt |
| 52081 | attaaaacat tctatcttta ttaataYcct ggaggttagt aaggcaaaat tggccacaga |
| 52141 | aagcaccatt agatttctgc atcagaacag tgtgaataca cagttccttg aacaagccat |
| 52201 | gctattttat gtccctaaga cttcttccat gatctttctc ttttctagaa tgttctatat |
| 52261 | gattcagttt aggtcttact tcttgtacca aatattttaa tcacactggt tattgagtgg |
| 52321 | acacaataat acaatctaat tagatagtat gatagcctgt tgaaagcctc aagtattaca |
| 52381 | ttgattttct attttttaat tagtttccat tctatttgct tctcagattg cctttaccaa |
| 52441 | agattatttt ctctgcaata ttcttatact cattcttctt cactcttgtg ctgaacctta |
| 52501 | cttgttgata tgttatattg tgaatcaatc ctccctatgt ctatgtttta tatcttactg |
| 52561 | ctttcttcat gcgttctggg agaaatcttt atttgatttt ctaaacaagg ttctgtactt |
| 52621 | ctctttgctt gctttcttct tttttgtttt taaaatttgg caccaaggtt ttgtgtttct |
| 52681 | gaaaagtttg gtagggtcct gagttggtag cttaatcttc acctgctgat ttttctgtcc |
| 52741 | tatctagtag ttttctgctt atattttcat ggaaccccta gatcaatcag tatcaccagc |
| 52801 | tgccactttt cattacaggc Rttgtatagg tctcgtatta ttgttacatt tttgtacagg |
| 52861 | gctggtgata atttgaggat agcttggttg gaagtatgac agggtcgggg gaatgtgact |
| 52921 | ggaaatctta aagacaggcc tcttgaccat tgtggataag tggatcctgt gctgtgcaga |
| 52981 | tgaaggtctg gtctggcaat tctgaagggt tggaggtaat attacaggaa gattttctaa |
| 53041 | tcaatggtgt ttgttatgga taactttact ttggcaaagt gaccaaaaaa taaatatttt |
| 53101 | ctctggcata attatggaca tattttgaag gtgaaatata ttatgagtta gcaattcttc |
| 53161 | tctatgtggg aagcagaaga gttctagctg tgctttaggg ttttatgggt gagagagagt |
| 53221 | agttgtttgg gcctacagac ccagctgtgt tactaggatt gctgcctctg atttcaccag |
| 53281 | acactgttta acatgggaag tggagataag tagttctgcc taggtggctt atggtagacc |
| 53341 | Rtcaggtagg aaaggaaggt cagcgagaag gagcaSaggg gcgtgccatg cagacatgat |
| 53401 | tcactgtgtg ggtggctgag gaaactgcag tcctggtgga aggcaggctt ctccttggct |
| 53461 | ggtgagtgca ggaagacaac aggtgatgcc tgcaaatatc actcagctca gacccttacc |
| 53521 | ctgacattct ccagtgtaag caatgagaga aagagattaa tgtatcagga aataataaac |
| 53581 | atcagctatg atctcaccac acacaaccac aacagaggtg acggaggagc tgaaacagac |
| 53641 | actgtcagtg agtgagggtg gggtcaaatc gagaagcagg actgcagcag gagcttaggc |
| 53701 | acttgtaggt gagtggacac tctcagcaat ccacttgcct tttacaacag atgaaaactt |
| 53761 | aacatacccc taatataatt cttgatttct acttcctaaa acctgctctc cttcatacta |
| 53821 | atttgttatg gctaccctaa aaaaatgccc cacaagtggc ttaaacaaca gaaatttact |
| 53881 | ttctcatagt tctggagctt gaagtacaag attaaggtgt caacaggttt ggtgtcttct |
| 53941 | gaggccctgt ctccttcact tctagatggc cggttcttgc tgtatcttca catggggttt |
| 54001 | tatctgtaga cgtgcatccc tggtacccct ctgtggtctg tgctaaYgtt cttttcttat |
| 54061 | gaggacaggt gtcagatggg attagcacca accctatcag cttcatttta acctaatcac |
| 54121 | ctctttaaag gccatgctgc aaatagagtc acattcagtg gtatcggggg taagggattc |
| 54181 | aacatgagag tttggaggga acacaattta gctgataaca cctcacaatc ttttctcagt |
| 54241 | tcatgacatt tgtttcactc aaccattcaa aaacataagt gtcactcttg attgtttagt |
| 54301 | ctcctccgtg tactgccctt agcaaatcca attggttcta ccttcaaaag atatcccata |
| 54361 | tatgatcagt ttcataatct ctatcagaag gYcctgagtc aagccatgat tctccctcct |
| 54421 | ggaggacttt caacagtctc cagctgatct tggtgacatt cctgcccctc accacatccc |
| 54481 | aWgcagttct ccttacaaca gccagagtga tcttttaaaa atagaattta gaacatcagc |
| 54541 | aagatggctg actagagttc cctggcactc atttccccac aaaaagaaat caagaaaaca |
| 54601 | aacaatttta tgtcagccag tgtgatttaa aaagtatgct ggagaccacc aggggaacag |
| 54661 | aaacacctct gtgaagtaca gaaactcaat atagcatcct gcctctgaca tactctctct |
| 54721 | tcagtcaagg ttggctcagg gtcatcagta actccattct acaggaaaaa gtaagctgta |
| 54781 | gttccccagt ggtccacatt gccataaaaa atgtcaacaa tctttgcccc actgttctca |
| 54841 | ctggcacaaa aaccagtctg gagagcagtt gggatttcca aactgcattg ccttacatag |
| 54901 | taagagacca ccttgagcac cctctgcccc tgcaatgtaa ggtgctatgg ctcagtgcca |
| 54961 | tctccaaact gaacctacat agagagtgtg tcttgctttg agcatcagta gcacctggct |
| 55021 | ctctatcact tgaggcccca ccatcattcc aacacattca tacaggtatc tgcagcacca |
| 55081 | tgaccctagc ttcccagagc ctagccagat aaactaatca agaccccggc atccgaaccc |
| 55141 | atgtggtgca ccaccaatcc agggaagaag tgaacagcag ggaagccacc catctgccta |
| 55201 | ctagccacga cacccacatg cacccacacc tcacaaccag ctagtctgct gagcctgtgc |
| 55261 | atgctggtgc ccagcctgaa aactggtcct gtggtgggcc cacccccagg actacagcct |
| 55321 | gcttgggcca caacaactct gagtttgtgc atggtctaat aattggtcct gcagtgaccc |
| 55381 | tgcctcctca gatgggactc tgcagagatg gatggccctg ctacacctgt gagcactgac |
| 55441 | agcaacccgc ccacccagca ggaagacMgc agtgcatgta agtgcacaca ccttgagaaa |
| 55501 | aggctcttcc cactgctgct ggtggcacag ttgctgctgt caccaccggg ggctgcagca |
| 55561 | gtgaaatgcc agttggaccc agcaaagtgg caggatcctc agcattctag catatgcagt |
| 55621 | gttctgcacc tcaggcactg gaaaggctgt gaaccagaca tagggagcca aagcacatgc |
| 55681 | tttccagaac cagagagctg cctccctgtg gctgctgaca cagacagcaa tgtcaccccc |
| 55741 | gcaacacagc agcagagatg ctgcacactt gcatgcaacc tggggacagg ccctctccat |
| 55801 | ctgctgctga gtctgctgat gcagctgggg gccagagcat gtgccactgg cagtgacctg |
| 55861 | acttccacca gcagcagagc cactgtgaac ttgcacgtac cctgaggact ggcttatgct |
| 55921 | gctgccagaa gccaaagtgt gctccacatt gccagagagc tgcctgctag tggctgctgc |
| 55981 | cactgacaat aaccacaccc tgccctagca gcacagctgc agcaaatttg catgtgcctc |
| 56041 | gaggacaggc tttcttcagg tattgctcct gctattggga gatccaagga ttaccccatc |
| 56101 | caacttacca cagccaacat ccatgtacat aactaggggg actgaggaca ggcctgccaa |
| 56161 | gcctggttcc atcatcccag tgcccaggca cactacccag gggtgtggca atcatcctgc |
| 56221 | tttgtccacc accactggca tttgcacatt cctttaggag gactgagaat gggcccaacc |
| 56281 | agcctgacag tagcactgta gccagaaaca atatgcatgc aacatctgaa ggtctggaga |
| 56341 | ctggccccca gcccatcaca accacctcta acaccagagc ttgcaacttg agaatctgag |
| 56401 | ggttgtccaa ccaagctaca gaaattgccc atggcaagca cattcccaga ggcctaaagg |
| 56461 | cccacccacc ctttcagcct accattgcaa ctgctagtac ccaggtaagc tacttaaagc |
| 56521 | ccccagaatt gttctgctta aagctgctaa aactggtaca aacatatgtt gcctaggtgc |
| 56581 | caaatatagg cactctcagc ccactgttac ccctactggg gcccaagaac tggcccacct |
| 56641 | aaaatctctg tccccaggaa aacctcacta cagcctccaa tcacaactac agcctaagcc |
| 56701 | actgaggaag tcacagacac cacttatgct gttaatagct gaaggaataa tataagacca |
| 56761 | ccttactgta cacacacaga atcaaagcca aagtgtccta ctgaatcaac accacagata |
| 56821 | catcttcaga aagaaaagtt aatgttttgg atctatgtca ctgcccaaat ctcatgttga |
| 56881 | attataatct ccaatgttgg gggaggggct tcattggagg taattggatc atgggggtgg |
| 56941 | atccttcatg aatggtttag caccatcccc tgcgtactat tcttatgacR atgagtgagt |
| 57001 | tctcatgaga tttgcttgtt taaaagtgtg tgtcacctcc cccccaccca gtccttctcc |
| 57061 | tgctatgtaa gatgcctgct cctgctttgc catttgccat gagcaaaagc tccctgaggc |
| 57121 | ctccccagaa gcagatgtca ctatgcttcc tgtacaacct atgaaactgt gagccaatta |
| 57181 | aacctctttt cttcataaat tacccactct caggtacttc tttatagcaa tgtgagaatg |
| 57241 | aactgataca gaaaattggt accgaagagt agggcattgc tataaagata ctaaaaatgt |
| 57301 | ggaagcgatt ttggagatgg gtaatgagca gaggttagaa gagtttggag gactcagaag |
| 57361 | acaggaagat aagggaaaat ttggaacttc ctaaaaactt gtaaattgtg accaaaatgc |
| 57421 | taatactgat atggaaaatg aagtctgggc tgaggagatc tcagataaaa ataaggaact |
| 57481 | tattgggaac aactggagca gtcacttttg ttatgcttta gcacagagcc tgggtgcatt |
| 57541 | gttcccctcc tttagggact tgtggaactt tgaacttgtg agtgatgatt tagggtatct |
| 57601 | ggtggaagaa atttctaagc agcaaagtgt tcaaaatatg acctggctgc ttctaacaac |
| 57661 | ctaagctcat atgcctaagc aaagaaatga gctaaaactc aaatttgtat tWaaaaggga |
| 57721 | agcagagtgt aaaagtttgg aaaacttgca gcctggccat gtggtagaaa aaaaattccc |
| 57781 | attttctaga gaagaattta ccctagctgc agaaatttgc atgagtaaag aataaccaaa |
| 57841 | tgttaacagc caagacaatg ggagaaagac attgaaggca tttcagagac tttcgtagcc |
| 57901 | acacccacat cacaggcctg gagtcctagg agggcagaat ggtttcctgg tccaggcgca |
| 57961 | gggccccact gacctgcaca gcctccaaac actgtttcct gcatcccagc tgctccagct |
| 58021 | ccagctgtgg ctcaaagggg tccagctgca acttgggctg ctgcttcaga ggatgccagc |
| 58081 | cataagcttt ggcagcttcc atgtggtgtt aagtctgtga gtgtgcagag tgcaagagtt |
| 58141 | gaggtttggg agcctctctt ttgatttcag aggatctaca gaaaagccta aatgtccagg |
| 58201 | cagaagcctg ctgcagaggc agtgccctca cagagaacct ctactagggc agtgcaaagg |
| 56261 | gaaaatgtgg agttggaacc cctacacaga gtccccactg gggcactgcc tagtggagct |
| 58321 | gtgagaagag agctgtcatc atgcagaccc cagaatgaca gatcctctgg cagcttgcac |
| 58381 | catgcacctg gaaaagctgc aggcactcaa tgtcagccct tgagagaagc tgtgggaaat |
| 58441 | gaaccctgca aagctacagg ggtggaactg aaaaggcctt gggaacccac cccttccatc |
| 58501 | agtatgcctg gttgtgaaac atagaaagtc aaatgaggtt attttgcagc tttaagattt |
| 58561 | aatgacttcc ctgctggttt cagatttgca tggggtctgt agcccctttc tttttacagc |
| 58621 | tttctctttt ttggaacagg agtgtttacc caatgcttgt actccccttg tatcttggaa |
| 58681 | gtaactgttt tttgaattta caggctcata ggtgaaagag actagccttg tctgagatca |
| 58741 | gcctttggac tttcgacttt tgagctaatg ctgaaatgat ttaagacttt gggggactct |
| 58801 | tgggaaggca tgattgtatt ttgaaatgtg agaaggacat gagatttggg agtagtgatg |
| 58861 | ggctgaatga catggtttgg atctgtgtcc ccacccaaat ctcatgttga attgtaatcc |
| 58921 | ccagtgttgg ggaagactgg catgttggga ggtgactgga tcatgagggc agattcttca |
| 58981 | taactggttt agtactattc tctcactgct gttctcatga tggtgagtaa gttctcatga |
| 59041 | gatcttgttg tttaaaagtg tgttgcatct cgcccccact tggtcctgat cctgccatgt |
| 59101 | aagactcctg ctccagcttt gccttttgcc acaagtaaaa gctccttaag gtttccccag |
| 59161 | aagcatatgc ttctatgctt cctgtacagc ctgcggaacc atgagccaat taaacctttt |
| 59221 | tttgaaaaat aaattactca ctctcaggta tttctttata gcaatgtgag aatggactga |
| 59281 | tacaaaaatc ttcccctatg aaagccaatt taaaaaacag aagaagcaac tatttcacca |
| 59341 | gatgcgcaga catcaatgta aggacacagg aaacatgaaa aagcaagaaa atatgacacc |
| 59401 | tccaaatcaa cacaatactc ctccagcagt agattccaat gaaaaagaaa tttatgtaat |
| 59461 | gttggggaaa atatttaaaa aatgatacta atggagctca gtgagataga agagaacaca |
| 59521 | ggtaaaaaat agaaagaaac cagaaaacca tttcaggata ttaaagagaa attcaacaat |
| 59581 | gaaatggata tcataaaaaa gaatcaaaca gaaacgctgg agataaataa atcaataaat |
| 59641 | gaaagaaaaa tacatctgaa agcttcRaaa atagaatagg tcaRtgagaa gaaagaatat |
| 59701 | cagaacttga aaacaaatat tttaaataac ccagtcagac aaaaaaagag ggataaaatg |
| 59761 | tgaaaaagat gaacaaatcc tacatgacat atgggatgcc ataaagcaac caaatttttg |
| 59821 | aatttgggtt tttcccaaag gcaaaatgaa aggcaaaaac ataaaaaacc tatataatga |
| 59881 | aataatagaa gaaaacctct caagtctagc aagagagtta aacacctaga tacaggaagc |
| 59941 | ttagatagat acaacccaaa aatattttct tcatgtcaca ttatactcaa actgtcaaaa |
| 60001 | gtcaaagaga aaaacactat agaagtggca gagcaatatg gtggaataga aggctccacc |
| 60061 | aatcatccca cccacaggaa caccaaattt aacaactgcc tacataatca aagcacttcc |
| 60121 | ataagaacca aaaatcaggt gatcactcaa agtacctgct tttaacttca tattactgaa |
| 60181 | agaggtactg aagagggtag gaaagacagt cttgaattgc catcgccacc cttgtcttaa |
| 60241 | cccagcagca actacataga atggagaatc tgtagacttg gggagggaaa gtgtggtgat |
| 60301 | tttgaaactt cgcattgaaa tcagtgctgc cttgtgacaa tggaaggcaa aaccggggtg |
| 60361 | aactcagctg atgtccaccc acagagggag catatagacc agccctagcc agaagagaac |
| 60421 | tgtacattcc agcagccaga acttgagttc tggcaagcct tgtcactgta ggctaaagta |
| 60481 | gtctgggtct ctaaataaat ttgaaaggca gtctaggcca caaggactac aaatcctagg |
| 60541 | tgagtcctag tgctcagctg ggctcagggc aagtagactg gtgggggcgg tgggtacatg |
| 60601 | acctactgaa acatcagctg gggtggctaa agcagtactt gggccatccc tccctcaacc |
| 60661 | cccagctaca cagcttatgg ctccaaaaga gaccacttcc ttccacatga ggagaggaga |
| 60721 | aggaagagtg aggaggactt tgtctggcat cttggatacc agcttagcct cagtaggata |
| 60781 | gagctctggt cagagtcatg aagccctgat ttcagactct agctcccaga tgacatttct |
| 60841 | agacacacac tgggctggaa ggaaacctac tgcattgaaa ggaagagcca agtaatgaaa |
| 60901 | gaaccaatca cctgctgatt aaagagcact tgggccttga ataacaagcg gtgatatcca |
| 60961 | ggtagtatgc tgtgggcctt gagtgagact ctgagatgtg ctggtttcca gtgagaccca |
| 61021 | acacattcct agctgtggtg ggtatggtca gagattcctc ctgcctgaga aaagcagaga |
| 61081 | gaaaaagtaa aggggacttt gtcttgaacc ttaggtacca ggtcagccac agagaagtat |
| 61141 | aacaccaagt gggctcttga ggtccccaat tccaggccct ggctcttgga cagcatttat |
| 61201 | ggacctgctc tggtccagac ggggagccca ccactataaa aggtgagtcc tagatctggc |
| 61261 | agcattattc accacaggct gaatgaagag cccttggtcc ttaagtgagc atcagtggta |
| 61321 | gcctgagaat attcccatag gcttgtggtg atggtggcca gggggcaagg tgcctgcata |
| 61381 | tgaaaaggga agattagaat gggaagaatt gcatctactg gtttgagtgc cagcttaaca |
| 61441 | gcagtacaat agaacacaag gtaaatttcc aaagttttgg actctggtcc gtggctcctg |
| 61501 | gacagcattt ttggacctgc ctggagctaa gggatcttgc tgctatgaag agaagcacat |
| 61561 | aagcctatcc gtaagcccca aagcagtact aagaaggaag attattgcta tatgtgccta |
| 61621 | catcaaaaaa taaaaaaact tcacataaac aatctaatga tgcatcttaa agaactagaa |
| 61681 | aagcaagagc aaaccaaacc cgaaattagt agaaaaaaga aataaagact agagcataaa |
| 61741 | taaatgaaat taaaattaaa aaatacaaca gaagaatgaa acaaaaagtt tgttttttga |
| 61801 | gaagatgaac aaaattgaca aaccttttga cagactaacc aggaaaacaa gagagaaaac |
| 61861 | ccaaataaat aaaattagag atgaaaaagg agatattaca acctacacca cagaaattca |
| 61921 | ggggattatt agagactact gtgagcaact atatgctaat aaattgaaga aactgataaa |
| 61981 | ttcctagaca aatgtaacct gccaagattg aactatacag aaatccaaaa acctgaatag |
| 62041 | acMaataaca agtgatgaga tcaaagccat aataaaaact gtcctagcaa acaaaagacc |
| 62101 | aggacctgat gacttcaatg ctaaatttta ccaaatatct aaagaagaac taatactgat |
| 62161 | ccttctcaaa ctattctgaa aaatagaaag ggaaggaata ctttcaaact catttggtga |
| 62221 | ggtgaatatt accctaatat gaaaactaga caaagacaca ttaaaaaaaa tacaggccaa |
| 62281 | tattttggat gaacattgat acaaaaattc tcaacaaaat gctagcaaac agaatgcaac |
| 62341 | agcccattaa aaatacaatt catcattact atgtggcatt tatcccatgg atgcaagaat |
| 62401 | aattcaacat gtgcaaacca atgaatgttg ataaatcata taaacagaag gaaggacaaa |
| 62461 | actaatatgc attgcaatag ataatgaaaa tcatttgata aaattcaaca ttccatcatg |
| 62521 | ataaaaatca tcaaaaactg ggcatagaag gaaaatgcat caacattatt aaaaccatat |
| 62581 | atgacagacc cacacctaat atcatactga atggggaaaa actgaaagct ttcctctaag |
| 62641 | atctggaaca tgacaaggat gctcactgtc atcattgtta ttcagcatag tactggaagt |
| 62701 | tctaactaca gcaatcagat gaaagaaaag agaacggaag ggaagggaag ggaagggaag |
| 62761 | ggaaagggag ggaaggggag ggaaggggag gggagggcag gggagggcag gggaggggag |
| 62821 | gggaggggag gggaggggag gggagggaaa agaaaagaga gcatccaaaa tggaaaggaa |
| 62881 | ggagtcaaat tatctttgtt tgcagatgat qaaactttat gtttggaaaa aaataaagac |
| 62941 | tccacaaaaa tgtattagaa ctgatagaaa cattcagtaa aatttcagga tacaaaatca |
| 63001 | acatacaaaa ttcagtaaca tttttatatg cccacaggga acagtctgaa aaagatcaag |
| 63061 | aaagtattct tatttacaat agctacaagt aagataaaat acctaggaat taaccaaaga |
| 63121 | agtgaaagat gaaaagtata aaagtataaa acattggtgc aagaaattga agataacaca |
| 63181 | ctaaaatgga aagacattct atgttcacgg attggaagaa tcagttttgt taaaatgtcc |
| 63241 | atactaccca aagcactctg cagattcaat gcaatcccta tcaaagtatc aaYgacattc |
| 63301 | ttcacagaaa cagaaaatac aattctaaaa ttcatatggt accacaaaag actcagaata |
| 63361 | gccaaagctg tcctaagcaa aaagaacaaa tttggaggaa tcacattacc tgactttaaa |
| 63421 | ttgtcttaaa tactacagaa ctatggtaac caaaatggca tgacactggc atagaaacag |
| 63481 | acatKtttgg actgtgagcc tggcctctat gaaccatcgt ttcagctcct gattggtcca |
| 63541 | gagccaaggc cctgggccaa gctgagtcac aagttctcca agacagccca tggactaagt |
| 63601 | gcattccttc cccttcccag tccataaaca ccctggaccc cagcctcata gagggcaatc |
| 63661 | catttgggtc cctctttccg ctggcagaga gctttcttct tttgtttgtt aaacttatgc |
| 63721 | tttaacctca cattgtgtct gtgcttctca atcatcttgg acgtaggaca aagaactYca |
| 63781 | gatattatct cagacaataa gagactgcta tctgggtccg ttggcaaaac tacaacatta |
| 63841 | caacaagaaa actttgggga aactctccag aacaccatag tgggcaaaga tttcttgagt |
| 63901 | aatacctcac aagcactggc aactaaagca aaattaaaat taaaaaaaaa cttcaaagat |
| 63961 | aaaaattatt aaaaagagaa aagcatccag tcatatgtaa gggaactatc accagatcaa |
| 64021 | aagagaattt atcaacagaa agtttatagg ctaggagaga atagtatgga atattcaaag |
| 64081 | ttctggaaga aacactttca gtcatacata ctatactcag aaatgttatc cttcataaat |
| 64141 | aaagaggaaa taaaatcttt cacagataag caaaagcttt agactaacct tacaacaagt |
| 64201 | gctcaaggga gttctacatc tRgaagcaaa cagatgataa tcactatttt gaaaatacat |
| 64261 | aaatactcac tgttagagaa gacacacaaa gaataaagag aatcaagcct tattatttca |
| 64321 | gaaaactaaa agaaatgata aacaataaga gaggaagaaa ggaagaaagg gacatataaa |
| 64381 | acaaccagga aacaatgagc aatatagaaa aaccaaaacc tcacatgtga ataataaccc |
| 64441 | tgaggtaaac aaattaaatt ccccatttaa aagatatata agtcatataa aagggaacct |
| 64501 | ccattagatt aacaacgaat ttgtcagaag aaaccttaca ggccaggaga gaatgagatg |
| 64561 | acatattcaa agtattgaaa caaaaaaaat cttatcagcc aagaatacta tttccagcaa |
| 64621 | agctattctt caaaaatgaa gtagaaataa tggcgttcct aaacaagaaa aactggaaat |
| 64681 | tcatcactac tacactggtc ctacaagaaa tcctgaagga aattctatac tttaaagcaa |
| 64741 | aaagacaata tggtccatca caaaaacaca cacaagtata aaactcactg gtaaaccaaa |
| 64801 | tacacaaatg aaaaagagaa aggattcaaa ttttaccact acataaaatc aacaaatgac |
| 64861 | aattataaac aataaaaaat atagaaaggt aaaaggacat atgaaataac cagaaaacaa |
| 64921 | ttaataaaat gacaagaata aatcctccgg tagtaataag cttgatggta aatgaactaa |
| 64981 | aattttcagt ttaaagatat agactggctt aatggatttt aaaaagcgtg acacaagtat |
| 65041 | atgctgccaa taataaagta aatttctctg taaagacaca tggacttaaa gtgaagggat |
| 65101 | gaaaaatgat attctatgca aatagaaaca aaaagtgaga agtactatac ttgtatcaga |
| 65161 | taaaacagat tttaattttt aatttgcaaa cagcaaaaag acacaaaaaa ggtcatcatg |
| 65221 | taagataaag ggatcaattc agcaagaggg ataatacaat tctaaatatt caaacaacac |
| 65281 | tggagcaccc agatatataa ggcaaatatt attagacata aagggggaga tagattccaa |
| 65341 | cagaataata gtgagggact tcaatgcccc attctcagcc ttagacacat aatccagagt |
| 65401 | gaaaattaag aaataaacat tggattttaa ctgcacttta gacatgtctc aaaaaaaagt |
| 65461 | atacgaatgt ccagtaggta tataaaaaat gctcaacatc actcatcatc agggaaatgc |
| 65521 | aaattaaaaa cacaatatca tccttctcca gttagaatgg gtattattaa aaagaaaaaa |
| 65581 | aaaacagatg ctggtgagga ttcaaggaaa aactcttaca taccgttggt gggaatgtaa |
| 65641 | attagtacag tcactatgga aacaatatgg agatttctca aaataactaa aaatggaatg |
| 65701 | accatatgat ccagcaattt cRcttctggc tatttatcca aagaaacaga aatgaggaca |
| 65761 | tcaaagggat acctatattc aaatgttgac tgcagcacta ttcaccatag caaagatatg |
| 65821 | gaatcaacct aagtgtccgt cagtggacaa atggattaaa aaaaaacagt ggtatatata |
| 65881 | cacaatgtaa tactattcag ccataaaaaa agaataaaat catgtaattt gtagcaacat |
| 65941 | ggatggaact ggagggcatt atgttaaggg aaataagcca ggcacagaaa aacaaacagt |
| 66001 | gcatgttctc acttatgttg atcacacaga ggtagagaat agaataatgg ctacaagaga |
| 66061 | tggaccagtg tttgtgaggc aggaggacaa gtatgaagag aggttcatta atgggttcaa |
| 66121 | acatacagtt agaaggaata aattcaaata tttgataaca gattagggtg actatgttta |
| 66181 | acaatatttc aaaatagcta gaagaaagga cttgaacagt tccccaaaca tagaaatgat |
| 66241 | aaatactcaa gatgacagat accctaactt gatcattata cattctatat gcttataaca |
| 66301 | aaatatcatg tgtcYcataa atatgtacaa acattatgta tcaattttta aaaatcagga |
| 66361 | ttgatagctt tactgctgaa ttctaccaga catttaaaga ggaattgata ctaattatcc |
| 66421 | tgaaacaatt ccagatattg cagaggaagt aatacttcca aacgcatttt acaaagccag |
| 66481 | cattaccctg attccaaaac caaagataca acaaataaaa aagccacaag ccaacatccc |
| 66541 | tgatgaatat caatgcaaaa attcaacaag attttagcaa agtgaacgca gcagcacatg |
| 66601 | aaaacgatca ttcactatga tcaagtgggt tttattcaac atatacaaat caataaatgt |
| 66661 | gatgcaccct attaacaaaa tgaaggacaa aggccatatg atcatctcta tagacacaga |
| 66721 | gaaagtattt tataaaattc aatatccctg cataagaaaa gctcacaaga aattagacac |
| 66781 | acaagatatg tacctcaaca caaaaaggcc atatatgaca aacccacaRg taacatcatg |
| 66841 | cagaataagg aaaggtgaaa gatttcctct aagattagga taaagataag gatgttcact |
| 66901 | ttcatcactc ctattcaaca tagtattaaa agtattagct agatatacta ggcaagagat |
| 66961 | agaaaYtaaa Maaattgaaa ttgaatagaa ggaagtcaat tgttcatctt ttYggatgac |
| 67021 | atgatcttat ttatagaaaa ctctaaagac ttcaacaaaa aactgttaga ataaatctgg |
| 67081 | taaagttgca gaatagaaaa tcaatgtaca aaaattagta gcatttctgt atgctaatgg |
| 67141 | tgaactatat gaaaaataat tcagaaaaca atttcattta caataaccaa aaaagaataa |
| 67201 | aatacttagg aataaactta accaaggaga taaaagatct ctaatactgc aaactatgaa |
| 67261 | acattgataa aagaaattga aaaagatgca aataaatgaa aagatactct atgtttatgg |
| 67321 | attggaacaa ttaatattgt ggaagtggcc atactaatca aaatgatctt cagatttaat |
| 67381 | gcaatcccaa acaaaatacc aatcagcata cttcacagaa ataaaaaaag cacacacata |
| 67441 | ttttccgtct ttgagtaatg tatgctctga aaggggaaaa aggcattgag atacaaaagc |
| 67501 | acattataag atagaaagct ctatgtgcca tttcctgtca tttaccttga tattagatcc |
| 67561 | aggaaactct ctctattttt aggccaaatt attagcaaac ttaattgccc ttcgccatgt |
| 67621 | aatttaacat aaaacacagg ttctgggaat taagatgtaa acatctttgt gaggcctata |
| 67681 | ttttcctcct gcagagagaa caggtaatct tacatctctc aaatttgttt cagttgtgta |
| 67741 | tggagacagc tatccctgat ttggtaatgt ttaaactaga cttttgcaaa aggatatgta |
| 67801 | tgagtttata taaaatttga tagtattgca tgtatttata ctgtgcaata tgtatatgca |
| 67861 | atagtttaag tgacaaaact aagtggtaca aatttacctt gaggttggct gcatttgtaa |
| 67921 | gttggggcag tcacttcttt ggagtgttgt gcagacttgg gaatgagaag ctgtagattt |
| 67981 | cattctaact ctgccactta cagcaggaca accacttgca aagcccagct ttctctatta |
| 68041 | aaataagacc ctaaatcttc ccaacaccaa taatgaagat gacattctca gatcaggaaa |
| 68101 | atgaagggtt cttcagaagg atcatcactg tgtcaggggc agcaactgga gatctgaaca |
| 68161 | aaatagctac ctgggcatcc aatccctcta ctgtgaaatg catgattctc cagacctttt |
| 68221 | ccaacacgca tagagctttc tgatcgtttt agtgcctact cttaagtatg aattgaatca |
| 68281 | aaggttgacc agacaattga agaaattctc catcaaatga gactcaaaga atcagaacaa |
| 68341 | agtgtaattc tgaaggaaaa gaggtaagat aaacagcaga agaaacgttt acaagactat |
| 68401 | aattaatata ttctgatata accataaaac ataaaaggat gctatcaaat agaagattga |
| 68461 | ccagagaaca caaaagaata tgagcaattg taaattaaat tgataagttc aataaaatgt |
| 68521 | aaagttaagg aaatccccta tgaggtaggg caaaaaggca aagatatggt ccataatgtg |
| 68581 | aagacaatta aaaaattcac ccaacatgaa ttttagaaaa agaaaacaga gtatatattg |
| 68641 | ggaaagacat tatcaattaa atactgccat acattaccca gaacttatgg ataattctct |
| 68701 | ccataatgaa aaaagccatt gattatctaa aagaccagat ttaacatttt caggccccag |
| 68761 | tgcaggaaga caaatggagg ctcacatact ctatctctga ataaccatac attataaagt |
| 68821 | aaaatcgacc ctaggttcag gttaggtttc catccaagtc ctgaagcctg tcccttggag |
| 68881 | actgcccttc taacctggcc tagagacaga agaatcatgt gtttccctgc accaacactg |
| 68941 | actgatcctg caagctgaga ggtgggaaaa tacggagtgg cagggctgtc tgctggagca |
| 69001 | gtgggcagga gctgagatga ggcccagcac tgacctggcc aagagacaga agaatcatgt |
| 69061 | gtttccctgc accaaccctg actgatcctg caagctgaga ggtgggaaag tatggagagc |
| 69121 | ctctaatgag ttttcagttc agcaaatcta gttaccagtc cccagatttc tgtttgattt |
| 69181 | ttcaaaatta tttcaatctc tgttaaaatt ctctgataaa tcaataaatt gctttcctat |
| 69241 | gctatcttgc agatatctga tttccttaaa attgttattt tgaattcttg atcagagagc |
| 69301 | taaccaactg tcatgtcatt ggggtcagta actagtttgg tacctttgtc cttttgggaa |
| 69361 | ggccatggct ctttgcttgc tgttgtttcc tgtgggtata cttctatgtc tttccataga |
| 69421 | agggttatta attaattcca gtttttcagg tctgggttgt gtttgttgtt attgagtcta |
| 69481 | tttgcttggc aaatcctcac tgctgggctg ttgcctccct tttgactcta ggtggtgtct |
| 69541 | caacctcact tttaccttgt ctttagtaaa cggttggagt attaactgtc cgaaatggga |
| 69601 | aatgtcccaa aggaattacc ctggaagtat gagaaacttg gctaggggtt atggtctggt |
| 69661 | gacctaagga atgtacctcc taaagcatgg tgctattgaa catctaccct gatttggctt |
| 69721 | ctcctttggc caagttatga acagtgtcca gaactggaga tgatcttccc tcctccctat |
| 69781 | tttgtctctt gctctcttca ggaatattcc tccctgagga cagagaatat tcatcttccc |
| 69841 | taagggagtc ataatgcatc tcatgggcta aggaagaaca agtttcttgc cagggaatcc |
| 69901 | aaggtggtaa ataatctgtt tgagaacatc aatttcactt tattcactct aaaatccatg |
| 69961 | aattggggga gattctctgc atgtgtggtg ccaggaagaa taggaaggag ggacatcatg |
| 70021 | gaggtggaag tcccatctcc tactgtcttc ttgatgattt tccacttctc tttggccctg |
| 70081 | agaaccatct cattttcata cttgagctat gtatttttcc tgacatagat ctcaaagctc |
| 70141 | tatatttgtt tttggtattc tgtttgttgg ggtagtaagt cagcttgcct ctacagcaac |
| 70201 | actttggaac tagtgggtag ctattttgtt gagacaacaa tatgctatct ctgaaaccac |
| 70261 | actgaccctt cagaaaattc ctccctcttc ctgacctgca agaataataa tcactgccga |
| 70321 | cactttggag ctggtctggg ttcatcccat tccatccagc actgctggca cccaWgtact |
| 70381 | tctctgatgg gtctgaggac aaacctacac agcctgtgcc aagaccattg ccagtacgta |
| 70441 | cctgcatgtg acaccttgga ttcttaggac tggcctacat aggccattgc catcaccatt |
| 70501 | accaccagca cattcaacct ggaagcctga gggttgtctt gctactgcta ttgctatcac |
| 70561 | ccatgccagg cacattgcac aaagtctcaa gaaccactca ctcaccaggc ccaccactgc |
| 70621 | aacttccagc accacaggaa actccctgga ggtacaataa tttacccaac tgaaactgtg |
| 70681 | gatattggtg tcaatgtttg ttgtctggag gctcaaagac cggcatgctc attccactgc |
| 70741 | tgccactaac atgtgttgca gactggccca tctagtaccc ctgttcccat caaaacctca |
| 70801 | caaaaacttt tactaacaac ctcagtctta gcaactgagg aaatcacaga ccactgatcc |
| 70861 | cgactagaga caaagaaacc atacagatat tatgctagtg tatacaccca gaatcaaagc |
| 70921 | taaagtgctg tatgcaacca acactacaga tatatctata gaaaaaatag tgttccccta |
| 70981 | tgaaagccaa tcaagaagag gctgttactc cagacgtgca tatactaata tagggactca |
| 71041 | ataaacatga agatgctaga aaacatgaca cccctacagg accacaatta ttcttcagca |
| 71101 | ggagattgca acaaaaataa aatctatgaa cttctaaaaa attcataaat atgatatcat |
| 71161 | agaagcttag ttaaatataa tagagcaaag ataatcaata caaaaatctg aaaaaaatca |
| 71221 | gaatatgaat aagaaattca ccagatacct agatgtcatg agaaagacca aacagatatc |
| 71281 | ttggtagtaa agaattcaat gaataaagta aaaaaaaaaa aatattttca aaagcttcaa |
| 71341 | cgatagacta ggtaaggcag aagaaaaaaa ttcaccactt gaggactaga tttctgaaat |
| 71401 | aaaccagata gaaaatataa taaatcatct aaataaagcc agtattcaat ataacatacc |
| 71461 | atgtagttac caaaggtttg attctgagta ttccagaata ctcaagaaga agagatgggc |
| 71521 | agaggcatga caaaaatttt aaactaagca catgtaccct aaaacttaaa gtataataat |
| 71581 | aataaaataa aataaaaaaa gaaaaaaaaa taatagctga aaatttgtca agtcaagtct |
| 71641 | agcaagagat ttagacattc aaatagagga cctcaatgat actcaaattg acacaacccc |
| 71701 | agaagtcctt ctccaaggca tacagtggtc aaactgtcaa aagccaaaag tcgttaattc |
| 71761 | taaaaacagt aagataaaag catcgagtca tgataatgga accctcatca gattaacagt |
| 71821 | gattttcact gtataaactg tgaaagagag ataaaatcat atatttaaag tgttcaaaga |
| 71881 | aaaaaaatct gccagccaag agcactatct tcagcacagg cgaacttcaa aatgaagtaa |
| 71941 | caataaagtt tttccctgaa aagcaaaaac agagaattca tcaccacaat gactgcccca |
| 72001 | caagatatgc ttaagggaat tctgctcctg aaagcaaaag tacaatatct accgtcatga |
| 72061 | aaacacaaaa aatttaaaat actccctagt acagcagaca aatgaagact tgaaatgatt |
| 72121 | taaattttac tattatagaa aaatactaaa ccacaataat aaaaagtgag agaaaaagaa |
| 72181 | acaaagtata tgtaaaacaa acaaaaacaa ataacaaaat gaagtaattt ctcacatatg |
| 72241 | aataataatc ttgattgaaa attgattaaa ttctccactt gaaagacata gactggctga |
| 72301 | gtgaattttt aaaaaatatc ctaactatat gctgcttaca agaaactgac ttcacctaat |
| 72361 | aagacacata tagactgaaa atgaagggat agaagaaaat atcccatgta aacagaaaca |
| 72421 | aaaacaagtc gaaataggta tattaacatc agataaaata gactctatgt caaaaacagt |
| 72481 | aatgagagaa aaagaaggtt attatttaag aatagaaaga tcaatttagc atgaggatat |
| 72541 | aacaaaacta aatatattcc cccaacacta gagtatacct agatacataa agctatcatt |
| 72601 | atgacatcta aaaggataaa tagattccaa tacaatagta gtgtaaactt taacacctga |
| 72661 | ctctcagcat taaacagatt atttagacag aaaatctaca aagaaatatt ggacttaatc |
| 72721 | ttaagaataa ggggacccaa tatacattat agacattttt atttaacagt ggcaaaacat |
| 72781 | accatttttc ttattagcct gtggaagatt ttctaataca gaccgtatgt taggccacaa |
| 72841 | aacaagtctc agtacatttt gaaaaagcag tatactttat tttcatatac cacaatggat |
| 72901 | aaaactaaaa atcaatatta agaggaactt tggaaattgt aagaatacat ggaaattaaa |
| 72961 | caacatgctc ctgagcaacc actggttcaa tgaagaaatt tagaagaaaa ttaaaatgtt |
| 73021 | tttgaaatat gacaatgtaa acacaacata cagcacaaat agtgctaaga ggggagatgc |
| 73081 | tctgaataaa ttctttcatc caaaagtaga gagatttcaa ttaaacaacc cagtgatcca |
| 73141 | cctgagggaa ctagaaaact aaaaacaaac tgaaccccaa attagtgaaa ggaaaaatat |
| 73201 | agtaaaaata agagcagaac caaacaacta gaaactaaaa aaaaacaaac ccaaactcaa |
| 73261 | tgtaatgaaa agttggttta ttgaaacaat aaataaaatt cctaagtgtc tagctaggct |
| 73321 | atactatata tgtgtgtgta tatatatata tacacacaca cacacgtata tatatatatg |
| 73381 | ctatactata tatatagtat agatattgtg tatctataca tatataaaaa tatatatata |
| 73441 | gacagaaaaa actgaatgaa acaaaatcag aaactaaaaa gaagatatta caacttatat |
| 73501 | catagaaata caactgtata ttttggacaa taatacacta atgaaaccgt atgttttgaa |
| 73561 | caagtataca ctataattga acaccatgga aaaagattaa ttccctgaca tatacaactc |
| 73621 | acacaaaatg agccaggaaa gaagggtaaa cctgaacaga ctaataatga gtaaagaaat |
| 73681 | agaatcagta ataaaaacga aatctcccaa caaagcaaag tccaggccta gatggtttca |
| 73741 | ctgatgaatt ctaccaaact tataaggaaa aaggaaaagc attcctcatc aaacaattcc |
| 73801 | aacaaattca gagaagagaa tacttcctaa ctaattttac aatgccagga ataccccaat |
| 73861 | gctaaaaaca tacacgaaca caacaacaat aactataaca aaaattagag gtcagtattt |
| 73921 | ctgatgaaca cagacacaaa aatcctcaag aaaatgttag caaaccaaat ctaagaacac |
| 73981 | atcagaaaga taattagcaa taatcaagtg gtatttatcc cagggatgca agaatggttc |
| 74041 | agcatacatg aatcgataaa tgtggtacat cacattaaca gaataaagac aaaaccaaat |
| 74101 | aagcatatga atagatgWag gaaaaagcat ttgataaaag ttagcatcca tttatgataa |
| 74161 | aagttcccaa cgaactacac aaagaaggaa tatacctcta tataatgtaa ccacatgtga |
| 74221 | cgaactcaca cctaacatac agaatgggga aaactgaaag ccatttctct aaaaactgaa |
| 74281 | ataagacacc actcagtcaa cattttactt tatgtcatgt cctagcgaga agaatcaggc |
| 74341 | aagcaaaaaa aataaaagcc atccaaattg gaaaagagga agttaaattg ttcctgtttg |
| 74401 | cagacgacat agtcttatat taggaaaaac acactggggc ctttcagagg gtagagggcg |
| 74461 | gaaggagaaa gaggatcaag aaaaataact aatggtacta ggcttgatac ctgggtgatg |
| 74521 | aaataatctg tacgacaaac ccccatgaca caagtttacc tatgtgacaa acatacagtt |
| 74581 | gtacgtctga acttagaata aaagttaaaa aaattgttaa cataaaaaaa gaaaaatcta |
| 74641 | aactccacca aaaaaattta ggactatcca ataacattgc aggataaaat atcaatatgc |
| 74701 | aaaaattagt agcatttcta tatactagca ataacccagc aggaatgaaa aatcagctat |
| 74761 | gaaattccct ttacaaagct ataaaaaatt aattactcag taatacattt aagcaagcag |
| 74821 | actgatgttt accagctata tgactgaaaa tgtcaggcaa tcatattgag cttttgtttt |
| 74881 | ttcatctgaa gagtaaacat aatgcaagga attattaaag ggctaccata ggaataaaag |
| 74941 | agctaatggt ataaaacatt attagtatta ttagtattgc atagtatcta tgcaatagtg |
| 75001 | taagtcagaa actgaaatgg cagaaatcta cttttaataa ccatttacat ttaatgtaat |
| 75061 | tattggtatt tttgagccat ttttgttttt catatttata ctacttttga ttgtttttct |
| 75121 | ttttcctgat ctatggattc cttgaaaatg ttttttgatt ccattttagt tgatctgtaa |
| 75181 | attttttgcg tgactctctg tacagcattg ttagtggttg ctcYgtgtta cattaYgcat |
| 75241 | acataScttt tcacagccta gtgctgtgca cattttaccc tattcagtaa aatatggaaa |
| 75301 | ccttgctttc ctgtcttttt aactgctccc cctttcccac tgtttgtaac agaatcatat |
| 75361 | taaatatatg tctatgtgca tttagtgcca cagtaaattt tgtcattttt gctttgacat |
| 75421 | aaatttattg tcttccaggt ttgcagctca gaaatctgaa ctgggtctca ctgcgttaaa |
| 75481 | tccatgtctc aaggctgagt tccttcctgg agtctctaga agaaaagctc attatcttgc |
| 75541 | cacattcctt ggccctcttc catctttaaa gctagcaatg gccagttgag ccatttgaaa |
| 75601 | ctcatgcaga aaacgtgaga agaaagatat tttgtgttta cctactttgt atttccaatt |
| 75661 | tttgtttttg gcttgttgtc attgttgttg ttgttgctca ttcttgttgt tgttgctcat |
| 75721 | tcttgatgtt ccagaaaaat cctattctat tttttccttt atgattagtg accttcatag |
| 75781 | aaccatttta taagataggt ctgttggaaa gMaattctct tagatttttt tttctgtctt |
| 75841 | ctaagaatgc ctgtattttc tctttattga tgagtagtta tattggacat aaacatctgg |
| 75901 | ttgacatttt ttttctttca gcactttgaa tattttagct acatcctatt ggttattctg |
| 75961 | ctctctggta ataacaccac tgttactcac attgtgtttt ccctatagct atggtgtcat |
| 76021 | ttgtttcttg ctgctttcaa aacatttttt ttagttttta gaaatttgac tacagtgttg |
| 76081 | cttgcatgga ttttcttggg tatattctgg ttggcagttg ctcatcttct tgcatctgta |
| 76141 | ggtttatgcc cattgcaagt ttggagaatt ttcagccatt atgtctttga gttctctctc |
| 76201 | aatagcatcc tcattgttct tcccttctga agctcagatt ttatcattat cacattattt |
| 76261 | gttataacct ttcttgttca taacagtatt taaaatttta ccctgtgttc gagtatacag |
| 76321 | tttctattaa tccagcctca agaatactga ctctttcctc catcatttcc tttctgttag |
| 76381 | tgatcacacc aaataatatt ttatttaatt ttttacacta catatctcag tatcaaaatt |
| 76441 | tctatgtcat tatattatat agtttctttt ttctgctggg aatttttttt ccatttaaat |
| 76501 | tgagagtgta cacattgacc tcataatgga tgtttgtaac acctgcttca gtgagattga |
| 76561 | aaatctcacc gttttaatat ccagattgtt tcaaggttat catctcttga ttatttaact |
| 76621 | ccttgagaat tggtcgattg tttctgattt tataaagtat gttgagtaat tttctatttt |
| 76681 | atcccacaca caggactttc tctgtttaca gtacacaata agttcaatga aggaagtttt |
| 76741 | ggacattgga gggtagaggc cttcttgctt aattgagatc cactcactgg ttcagatagc |
| 76801 | aggggatttt gtcccactaa catttttcta cttggagctt ctgcctggat gatcctttat |
| 76861 | ggctcttacg agataaaact ataagtatat ttaacatcat agcatacata gtgtgcactg |
| 76921 | aaggggtccc aaaaaattcc tattcacaaa gtctttttta gttttctttt gtgcatcatt |
| 76981 | tgctcaaatc tcaattgaat ttgaggactt cattttcctt tcttccctac agtaacaaca |
| 77041 | cagtttaaca cctgcttaat tagagtctat tacagtaccc gggtaggcct gctgtcttct |
| 77101 | gactggggat ttatagaaag tggataatac ggctgaggta aaatcaacga ctacaggcct |
| 77161 | ggcgaaatgg ctcatgcctg taatccaact actttcaagg gcagaagtgg gagaattcct |
| 77221 | tgacacaagg aatttgagat atgcttgggc aacatagtaa gacccagtct ttataaaaaa |
| 77281 | attacaaaag gatcctggct cggtggtttg cacctgtaga ctcagctatt tgggagggtg |
| 77341 | agctgggagt atagattgag cctgggagag caaggctact gtgagccatg attacgccac |
| 77401 | tgcactccag cctaagagag agagcaagtc aaagtctgaa aaaacaacaa tgaaaaccac |
| 77461 | ccaaaaaaca aaaaagacta gggccaccaa aaaggctttc tttttcactt gacttcttgc |
| 77521 | tccagggttt acctttttaa agtgcacctc ccagtgtcta gggagtctac agacttggag |
| 77581 | tctcttcctt tcttgcctcg gtatcacaag tggctccatc ctatatcctt cagcactcct |
| 77641 | tccccatttc ccacagagcc aagtagaata gtgatttgaa cacatataag caattttaat |
| 77701 | ccctaccctc cttgatgctt tacaaaattt tgggatggat ctgttaagct tttgtctcat |
| 77761 | ttgagtcagg gatatctcag gcccagctca aatccttaaa ggaactgaga tcagagtaga |
| 77821 | ggaatagaag tgataaggga gatatgtata aagtgtcttc atgcaagtaa acaagacaca |
| 77881 | tttaatttca aattcaagca gtgcagacat tgctcaaaac caattgaata aacatttgaa |
| 77941 | ttttaggtct caccaaaggt ctacaacagt gatggagtat ctttaattct tctacctctt |
| 78001 | gttctctatg gaaaaaagca aatgtaaagg tgtcatttgg taagtttgtt tcaattctac |
| 78061 | catcagatac tcagttttca accatttccc tatcctactc attaatgaac agcataaggg |
| 78121 | aaattttcat acattttggt caacatacca gctattggtg tgtccttttt acattaactg |
| 78181 | aagaataata aatagtcttt acagatgtta cgagattaca aaacaaaaag catccaaagg |
| 78241 | atctaaatta gggtgtaatg tggatgccta atggttttct atcagaactc tcaccaattg |
| 78301 | ccctgtctga tgagagaaat gagcaggagc tctgtcgtgg tgaaggactc tgctgaagct |
| 78361 | cccccaggca tttctctact agagttctgg ctttctcaaa atattctcag aataagcata |
| 78421 | tattgtcctt ctctggccct tcagaaagtc aataagcaaa atgccttgag cttcccaata |
| 78481 | aactcttaca attacctttg cactttcctc atccactctt ctttgactgg accacttcca |
| 78541 | cctcttggta gccattgctt tgattgtgct ttgtttcatg attgtactga taaagccatg |
| 78601 | ttatatctgc tgtcacaatt ctttgatgaa atgcttcagg atctttatcc ccttatttaa |
| 78661 | attttcaggg aagcttcttc tcttgtctgt agctgctctg gttgccatag ttttggcatc |
| 78721 | cacagagtga aaaatttgct caacattaat ttttcagtta gaatcatgta agatgaacca |
| 78781 | attaaaaaac atgaagggtt ggctattgtt tgtactctta atcttcattc ctcttctatc |
| 78841 | atggtatcaa caagatacat ttgatatgaa tactctgtca ccgtagactt gaggttcagc |
| 78901 | accatttcat cccttcttga aataacatat ctacttgtga actgctgatt tcttcagcca |
| 78961 | ttatccaYat gaacttttca gaaagcatca gtggtttYac cttctttcat gcaagcttaa |
| 79021 | ccataaattt tctctttgtt ttcactttaa ttttagaaaa atgtattttg ctcttatagg |
| 79081 | ggatgttttg aaactcctgt cttatttttc attattcctt gaaatagctc ctattcagac |
| 79141 | atcttacagc atatcagttt aggttcattt tgatgccaaa aaatgtggaa tccttttatg |
| 79201 | gtatttctta atataacata cattttcatg aactttttaa agacctacta cattacagga |
| 79261 | aggcctttca ataatataag aattgctaca ggtaacattg aattttctag ttgattaggc |
| 79321 | agattaaMtt tctgtttttc tgctgacata aatagtgatg tgggttgaga aggaatataa |
| 79381 | taccagtggt caaatattct gcagctatgt ggaaagtcaa acagttgcaa ctaagtgtca |
| 79441 | catgctttaa gggagtcata gagtagctgc ttgggcctag caggtaccct gatgttaaca |
| 79501 | ggatgattgt ctctggtttc accaaacatt acttcaaaag agttactgga catgagcagt |
| 79561 | tttgcctagg tagcttacag tagaccttca agtaggtaag gaaggtcaga gagaatgagc |
| 79621 | agaggtgaat gccagtcaga tgtgcctctt tgagtgggta gctgaggaag ttccagtcct |
| 79681 | ggtgggaggc aggcttctcc ttgtctcctg agtccaggaa gagaacaggt gatgcttcca |
| 79741 | tatatcactc aactcacacc ctattcctga ccctctctaa tgtcagaaat gagtgagaga |
| 79801 | gatttgtgtt tcaggcaaga ataaatattg ggtatcaacc taccagacaa ccaaaacaga |
| 79861 | gattaccaaa gagctgaagg agacactgtg actgacttag aatggagtca aagccaggag |
| 79921 | caggactgca gcaggcgctt aggcatctgt acaggagtca aggacctcag caatccacct |
| 79981 | gtcatttaaa atgaatgtaa acataccgtg taccaagtag aatcttgatt tccaccttct |
| 80041 | ataacctgtt ctctttaata tcaacaatca ttaatttcag accaagaaac cagaatatat |
| 80101 | tgagaaacac atcaatgaaa caatacattt cccagaacta aaggttaatt ctccatatcg |
| 80161 | aaagggccca atgattatcc aaaagcccaa atttaacatt ttcagggctc agtgcaagaa |
| 80221 | gacaattagt ggctaacata ctccaactct taataatcac acattataaa gcaagctaga |
| 80281 | ctctaggttt agatcacatt tccatgtaag tccttcagcc tgttgcttgg agattgctca |
| 80341 | tataagctgg catagagact aaaggtgtct gtgtttccct gtaacaatcc tgaccccgca |
| 80401 | atctgagagg tgggaggagg ggggcacagg gctgtctgct agagaagcac actagacgtt |
| 80461 | gggctggagc ccaggactga tctgcccaag cttcgagagc ccctgccagg catgttatgc |
| 80521 | tcccctatgc ctcacttctg agtttggact agtggcaatg tctacacagc tcccaatgat |
| 80581 | aaccctactg agcataggac tggcagagaa taataaccag aatatacaaa caaacaactc |
| 80641 | aaaaacaaca aaatagtcca ttaaaaagtg aacaagagat agaaatggac atcttttcaa |
| 80701 | ataagacata caaataatca acagtatgtg aaaaatactc tatatcacta atcatcagag |
| 80761 | aaataaaaat caaaaccaca ctatcacctt accctattca gaatggctat gattaaaaca |
| 80821 | aacaaacaaa caaaacagat gttgggatgg atgtggagaa aggagagctc ttatacaccc |
| 80881 | tgattggaaa gtaaatagta taaactctat ggaaaacagt aYgatttctc aaagaactaa |
| 80941 | aactcgatta ctattcaatc tagcaatctt actactgtat ctatgcagag gaaatgaaat |
| 81001 | cagtatatga aaaataaatc tgcacttcta tgtttattga aacaccatac acaaYagcaa |
| 81061 | agatatggca tcaacctaag taaccatcaa tggatactaa tgggtttgta ggtaaagaaa |
| 81121 | tcgtgatata tacacaatgc aatactactc tgcaaaaaaa aaaaaaaaaa aaaaaaagaa |
| 81181 | ggaacgaaat cactcctttt gtagcaatac gaatggaact ggatgtgaca gataatatgc |
| 81241 | tatgtgacaa aggccagata cagaaagtca agtataacat gttgtcacta ataagtaggt |
| 81301 | gctaaaatgt gtttacatag atatagaggg gagaactata gacactgaag ccttggaaga |
| 81361 | gtgagtgggt gggagggaat taagagttag acattaatta gtaaatgcaa tRtttgttat |
| 81421 | tcttgttatg gaaaccctaa ggccatgatt taaccattat gcaatgtata catgtaacaa |
| 81481 | aattatcttt gaaccacata tatttataaa aataaagttt aaaaataaat tgagggtgac |
| 81541 | cgggtgcggt ggctcacgcc tgtaatcaca gcactttggg atgccgaggc ggatggaaca |
| 81601 | cgaggtcagg agttcgatac cagcctgacc aacatggtga aaccccgtct taactaaaaa |
| 81661 | tacaaaaatt agccaggcat ggtggtgcat gcttgtaatc ccagctactc aggaggctga |
| 81721 | ggcaggagaa tcgcttgaac ctgggaggcg gaggttgcag tgagccgata tcttgccact |
| 81781 | gcagRccagc ctgggtgaca gaatgagact ccatctcaaa ataaataaat aaataaataa |
| 81841 | ataaataaat aaataaatat aattgaaggc aaatttaagc atattttttc aaaaaagaaa |
| 81901 | aagagggaga tggagtagga gaaataaaaa agaaggaaga ggaggaggag gaggaagaaa |
| 81961 | gagcctgcat ttctaattgt cataattaaa tttccataag cagatactat tttttttaaa |
| 82021 | aaaaacctaa ttagaatttt acgggtctga taagaaagaa aatgctaaaa aaaatatgRa |
| 82081 | tactcaRtgt gttcctattt tgtttgaaag cctagaaaaa aacaatatca gagactattc |
| 82141 | tacttagatt ttttggacaa agaaatctta agatttttaa ctcgggaaca tttaattcct |
| 82201 | cacaatttca tgtctgctgt tctttcctaa aatcattatt gtgaagcaga catgactata |
| 82261 | tccactagtg tttcatgtat gtgatctgct tagtcttcat cctttagggg agccattttg |
| 82321 | attattcaaa aatttagaag aggaaactta ggctctgaga cttaagtagc ttcctatgag |
| 82381 | tccagagtta gcaagacata gttcttaaac tgcaatctga gagattccaa attctttgcc |
| 82441 | cattcaagtc aggctgcctc tgatgaaatc catttaggtt ttcttaagaa tagtaagact |
| 82501 | cataggcagg gacagaactg atcagtgata aaatatggga aaataggtct agtggcttct |
| 82561 | ggggaataga ggcatagaac catactcatt tccctagaaa acaaaatcgg ttacttttga |
| 82621 | acttgttaaa atttctctca gcttctggga ttttctttca ttggtattgt tttgcttaca |
| 82681 | ttcataagct gactagaata tcaagaaatg acctgaaaat aattgtacaa cttaaattcg |
| 82741 | agctatagaa gacagagaag gaaagaaaca gtggaactcc ttccccaggt ggatgactta |
| 82801 | ataaggataa ggaggagaga agcttgctgg aaacatcaag gagaaggggt cctggatatt |
| 82861 | cttacaatgt gaacatgggt ctcagattct agagtcccaa acactcagaa agagacacca |
| 82921 | ccagcagaaa ttgcaagctg attgttttat tggtataYtg aagttagagc atgatgccat |
| 82981 | gtttcacggc atttgaaaca ctgttatctt cttattcact tcctgaaaaa gacaagcaaa |
| 83041 | caaggaagat tacagacaac acttgacatg gcaggaaatg tctaatccct cactgggggt |
| 83101 | tactgcagtg atggagatgc aagcccctac tcttgccctc tatcccttct acagccccct |
| 83161 | tctccttagt aatattttct ttgttcactc tttaagccat tgcacataat gtgatttaaa |
| 83221 | gtgttgctta gatgagaaag agaaacaatt attgttatgt gttcatgctt tgctgctgtt |
| 83281 | ggttatgtaa gggctatttt tacaaagatg ggcactgcaa catatcatat aatagtgaga |
| 83341 | atgtgaatcc Mgccttaata tccagtgaca gggattggtt aaatagatta cggaacaacc |
| 83401 | aaacaataga atagtataca attgtaaaaa caaactaacc aRtaaacact gaagagatct |
| 83461 | aaatgaactc aKgagaaagt tttctaaaca ataaattttt ccagtgagta agacacaaat |
| 83521 | ctgaatatac agtatggtat aagtgcttgt aataaaagca ttatatatat ttatgtagca |
| 83581 | atatatattt caaaaagtag attccaaaga gtaaaaggtg ggggttttga gaaggataga |
| 83641 | agggaggaaa gatgagttag gctcttacta tttagctctg tacatttcgg ttcagtgaga |
| 83701 | ttagtttttg ttagcttaag catgtatgac tttaaatgta agtatactaa aaatgagata |
| 83761 | ccattttaca actgaaagtt caaggaccac ttagcaggaa tactggacct gaaagcctga |
| 83821 | tgtgaggcag gactgagcaa agcatgttca ggtgaaaact ttaaatggga gtctgagttt |
| 83881 | gaggaaagaa aatagagaga gccaaagggg gaacatggtt ctatgtcctc attgtcaacc |
| 83941 | ctacttaaga catgtaattt gaagaYagtg attctcaaaa tcagaattgc cttcaagagc |
| 84001 | ttctgtaaaa cacagggtca cagggtcttg atactctata caagaatatc tgaataacaa |
| 84061 | tttttagaaa tgtgttccag gacagggcaa tattaacagg ttttcagagg attcattggc |
| 84121 | acaatgaagt tggagaactg tagcagttgg agcctttgat ggataataaa ctggaatcgt |
| 84181 | acctgtcatt gaatcctaga ttactgagga gactgcccct gtggaggtcc ttgtgggcgg |
| 84241 | cccccttggg gaggtggtcc ctggggcttt ccaggaggag gtgggggagg accttgctga |
| 84301 | tggcctccct gttggggtgg tccttgtggc cttcctcgag gaggacgggg atggcctccc |
| 84361 | tgttggggtg gtccttgtgg ccttccttga ggaggagggg gatggcctcc ctgYtggggt |
| 84421 | ggtccttgtg gctttccctg aggaggtggt ggaccttgtt gctgctggcc tccttgttgg |
| 84481 | ggtggtcctt gtggctttcc ctgaggaggt ggtggacctt gttgctgctg gcctccttgt |
| 84541 | tggggtggtc cctgctgagg gccatcatcc tggttcccat caccagcaga gggttgagat |
| 84601 | tgctgtcctc ccaaaggtgg tccctgacgc tcctcatcta ggaactgctc agagtctcct |
| 84661 | ccatctgtgt gagttgaaac aagaagagct gagctcatgc tggaaaaccc tcctgtcttc |
| 84721 | atacctctct gtcttcacca cacggccggc ccctctctgc ctgacctgcc tctcaactcc |
| 84781 | caacctcccc ccttcccaag gcttcctaat tagaactcct cttaatccac ataagggtga |
| 84841 | tgaaaaattg aatttcttta ctcatggtcc ccagaatcaa ggttgggaga aaactgtttg |
| 84901 | tatctttggg gcattggtat tagccaattc ctgacaagaa aatggtgata agaagacact |
| 84961 | ggagaactca tcaatttttc agggaaaaat ggagacagag tttactgaga atttattggg |
| 85021 | atttacctga tattacgagg ggaacatctt cctggctgac atctagaaaa gaagtacagg |
| 85081 | atgatgggaa aagttacttc ctgaatcatt caaggctcat agtgttctac gaggataaag |
| 85141 | gacctctgat cacaccctgt gcatcccctt tgtgatctca tcagccactc tctgatgcta |
| 85201 | ctggaagtgg aagaagatgt aagggaaagc agtattgtta ctacactgag cgtcaaccag |
| 85261 | gaactcaaca tagaagggcc cctgtttgtc ctcttttgat tccccaagcc ttgatgagga |
| 85321 | atgaagatac aataggtctt ctgatcctcg gcatgaaaat tctgcagtcc catctgtttt |
| 85381 | ctcatcctcc tctcttccct ccactttcct cctctatagc atttgcctgt aaacccttag |
| 85441 | cgcttattta gttaaactgc tctgagtatt tcaatgacat atttggggat tcttctgccc |
| 85501 | tctttcatct gtaaatatgt tgtttatgtt tgcaagcctt ctcaacagga gccaccagac |
| 85561 | atagccactt ggatataatc ttacgcatgc cattcccagc acattgaaat actacattca |
| 85621 | ggagacagaa aaatgacaat gtttcactct ggttattctc taactctatg tagacagaga |
| 85681 | caagtgttta cccaattctc tgcctcggca gtagctctga catgtgttta tctccttcat |
| 85741 | taatgctcat ccactgtaca gcaaggccac catcatccct gtctactggg atcagtacag |
| 85801 | gatcttcaca gctgtacttc cctgaatctg tcttgcattc tccacatcct tcacagcagt |
| 85861 | cccatgtctc tatataatgc aaatctcact ctctcacacc cctagtacga attctttatt |
| 85921 | ggattctatt tgtgcaacaa ataaactatg aggccttgat gaggaatgga ggtacaatag |
| 85981 | atcttctgat cctcagcatg agaactctgc agtcccatct gttttctcat cctcctctct |
| 86041 | tccctccact ttcctcctct atagcatttg cctgtaaacc ccaatcagag tcacaatatc |
| 86101 | ttcccccaat tcatcttacc ttcatttaaa tcctgagctg agctgaaggc cagcagggcc |
| 86161 | actgacagca gaatcagaag catcttgcag gaggctctgg tgtcactccc aactttgtgc |
| 86221 | tgggagaaac gtgtcagctc cctttataaa gacaagcagg acaatggtgc atttgagctc |
| 86281 | cctaccaggt gggcctcctc gcctcagaga ctggcttctg ctttgcttac ttcaggtcaa |
| 86341 | gtgtatccct catttctttt gggactctag ctcagcagga agggttgggt aggatattgt |
| 86401 | ttgtgtctaa ttcctaaaag gcacaactat gacttggaca aatgttttga cggaactgtg |
| 86461 | tccaagcagt cggcacagtg tcaggattga actttagaca tcttttggtt ttcaatctgt |
| 86521 | ttggaaagac tgctattctg cttttcactg tgcttttcat ttStgtgtat gtgagtttgt |
| 86581 | gtgggtgtgt cggggggtgg acactgatcc tacagctaac agtgaagatg gtcaatatct |
| 86641 | ctgactgttt tgatagcctc tttccatctc tcatgatgtg tgtgcgtgga tattttcaca |
| 86701 | tttagctaaa tttttcatgt aacagagatg gtcttgctta tctgtgagat gtgtgaggac |
| 86761 | agcacactcc caggcacaca tatatgaRag aaaggKgctg gcagcctgct caggctacaa |
| 86821 | gaattgtcca aacttctgtg aatctcacta cactcaggca agccttggtg ctatacaaca |
| 86881 | caggcaagct aaaatatttg tattttaaaa atatctttag ggtttattaa agcaaaactg |
| 86941 | aactcagaaa ccaccaagga atttctagac ctgaacaaac tgaatatatg gttccctaag |
| 87001 | tgagccacac gatgtcatat agctaagacc tccactttct ccagaatatt ccatagaatt |
| 87061 | catcctctac tttatttctt ctaataaata ttgtaattgt catcactgat aattaaatgg |
| 87121 | ccacaattat acattcatct aagataattt gtaatacctg tccaagcctc aattgccttg |
| 87181 | attggtcttc tgcttttact cagtaattat gtcacctgtt tcatcagagt gttctttctc |
| 87241 | accaaggatt tttatctgta atattccaat actcattctt tctcattctt tttctcgcac |
| 87301 | ttatttgttg aaattttgta ttctgagtct accttgccat gtttactttt cgtcctatat |
| 87361 | cttttttttt ctccctacaa aggtgtcctt tatttatcct tctaagtaaa ggtgtgtggt |
| 87421 | actcctcact acctttactt tcatttttgt ctgtataatt tgacaataaa aaattaagtt |
| 87481 | tccaaaaagc cctgtcaggg tcctggtttg gtagctctct cctcagctgc tgattgctcc |
| 87541 | aaaaattaag tttccaaaaa gccctgtcag agtcctggtt ttgtcgctct ctcctcagct |
| 87601 | gctgattgct ctgtgatacc tagaaattcc ctgYtcatca attcataaaa tatactactc |
| 87661 | agaatcacca gctgcacttt ccatttcaga ccttgagtag gtcttgtgta atttttcact |
| 87721 | ttttgtgcat ggttagtctt tatttgagga tagcttggtt ggaggcatgg ctgagaagcc |
| 87781 | aggtgacaga aaatcataaa gacaaggccc tagacaggtg tgcatgagtg gatcctgtgc |
| 87841 | tgggcatatg agggtctggt atggctcttc tgaaaagttg cagataataa tacaagaagg |
| 87901 | cttcctagta gattagattt tgctacagac gacattgttc ttgtaaggga cccaggcaga |
| 87961 | ttggtatttt ccctggaata aatatagacc tatttcaggg gggaatgcat tcttaattgg |
| 88021 | caattcttct ctggccctgt gggaagtaga tcagctctag ctgggccgta tgagttgtat |
| 88081 | ctcaggcaca gagtagttgc ttgagcccag cagctcccaa tgcgttatgg agattattgt |
| 88141 | ctctggtttc accaggtact gtttcccata ggacctggag atgagcagtc ctgcctcggt |
| 88201 | gacttcaggt caaccatcat gtcaaaaagg aaggtcagag aaaaggaaca aagaggagtg |
| 88261 | ccaggcagat attgcctgat gatgtggggg actgaggaag ctgcaggcct ggtgcaagac |
| 88321 | aggtttctcc ttggcagcag agtacaggaa aagaacagga aatcctccta aaggtcactc |
| 88381 | agctcaggcc tgctccctaa cctgctccaa tgtcagcaat cagcgagaga ctagtgtatc |
| 88441 | aggaaagcat aaatatcagc tatgctctca ctagacacat caaaaacaga ggtaatggaa |
| 88501 | gagctgaaag ggacactgtc tgtgagtgaR ggtgggtgaa agggagacgc aggactgctg |
| 88561 | caggagcttg ggtacctaga ggtgggtggc agccctcagc accacacttg ccttctacta |
| 88621 | tagatgttca tattctgagg ccctgaaggg ccagtcttca acatatgaaa ttttaggatt |
| 88681 | catctctcat aacacatccc aacattttct cggtcactga caggtgttta cctagtggtt |
| 88741 | caaaaatcct cgctccctcc aggaacttat gcattagccg atctaattgc ctccactttc |
| 88801 | aaaatacgtc ccaaatatga ccacttgcct gatctttact agaaggtgat tgttcagcca |
| 88861 | tgatgctctc tcctggagga ctttaccagc ctccagctgg tcttggtaat gttcttcccc |
| 88921 | cagctcatcc catatcagtt ccctcacaac aatcagagtg atcatttaaa agtagaaatt |
| 88981 | aggttatatc acatttgtgc ttcaaatctc ctgttttttc ttctgcactt gtgataagat |
| 89041 | ccaaatttca tgcctcagct ctttcacacc cacatgcctc actctttttt gaaaaccagg |
| 89101 | aagctctctg aatggaacag aaagtagaat cttcttcgac ttcaccatgc tctagtttgc |
| 89161 | ctggaacact aaagatggtt tgccaggaaa gatgaacatt gRcagaggga ataaacttct |
| 89221 | ctgagagtca gtgagtttca ttgggtcgct gtggtctggc agtgttatga attggcagaa |
| 89281 | ttattctatt aattgcacca actaagcatt ctgataatac agttagcaaa taaacacaat |
| 89341 | agtctctgag acttcaactt gctttgactt gtctaaaaag tttggtgaca ctattatggc |
| 89401 | caattaacta ttaaaaatat cttctatatt tttaaatttg atgttagtgg tccataaata |
| 89461 | tatatatttc acaattaatt tagcatattt cttttttttt tttttgagat ggtgtcttgc |
| 89521 | tctgtcaccc aggttggggt gcagtggcat gatctcagct cactgcaact tccacctccc |
| 89581 | gggttcaagc aattctcctg cctcagcctc ccaagtagct gggattacag gYccctcgcc |
| 89641 | accatgactg actaattttt tcccatctct actaaaaata caaaaaaaaa attataYcta |
| 89701 | aagaaattaa gtcacatggc taRggtcact gtagtaaatg aggaaaaatt aagttgattt |
| 89761 | tctcttctct ttgtaattcc agtttaaccg gatgttgtcg atgttgtttt caatttagaa |
| 89821 | aatatagcaa attgttcatt agccatgagt atcactctgc tatccaccac tttctaagaa |
| 89881 | ggcgcttatt ttagaacaag gctaacacta aattacagga aattaagtaa ttgtggcaaa |
| 89941 | ctagagaagc atagtatgta taataggtct tactcagtta gatccacctg tcaaggctga |
| 90001 | gtccctttct ggagtctcta gagaagcacc cattttttgt ccacattcct tggccttctt |
| 90061 | ccatcttcaa tgccagcaat agccacttga gcctcccatc acatagcatc acgtcgccct |
| 90121 | tgcactgact cttctgcctc cctcttctgc agttaatgac cttatggtta cattgagtcc |
| 90181 | acctagataa tccaggataa cctttctaaa ttcaggtcaa ttgattcgca aatgtaattt |
| 90241 | ccctttgtca tgtaagttaa tatattcact tgtctgagaa ttaggaagtg tgtgactttg |
| 90301 | ggagactgtt aatcttcata gaacacacag gatggacacc ttacccatct agacctggtt |
| 90361 | tggctcagtg agagttggag agactcaccc aggcttcttc cagatatttg catgagaata |
| 90421 | tgaatgagtt tatgtataat tagttgttat acaaatattt gtgacttaaa gtatatatct |
| 90481 | atgcaaaagc gtaaatcaca aactgagatg gcaaaaattt actttcaata accattgaca |
| 90541 | cttaatgcat tttttgatat tttagagctg tcatattttt tgttttttat ttatactact |
| 90601 | tttgattgtt ttctttttcc tgatctccta tggggccact gaaagtgttt tataattcta |
| 90661 | ttttagttga tccgtataat ttttgagtgt atctctctga acagtgtttt tagtgattct |
| 90721 | tctatgtttt actttacatg tacatagctt ataatctagt ggtgtacact ttttaccagt |
| 90781 | tttagtgaag tatggaaacc ttacatccct ttataatttt taggtcaaaa tgaatttatt |
| 90841 | atttttcagt tttgtaggtc agaaatctga actgaggttc actgagttaa atccatgtgt |
| 90901 | caaggctgag tttcctccta gaggctctag agaagaatgt catttttcca catttcctgt |
| 90961 | ctctcttcca tcttcaatgc tagcaatggc tggttaaaac atatgaagaa aactcaagtg |
| 91021 | aaaaaggaag atatattgtg tttgcccact ttcccccttt ctSttatttt tacttcattc |
| 91081 | ttgatgttcc acaaatttct cttctattct ttcctttatg tttagagaac ttcatttggc |
| 91141 | tattatttaa agataggttt gttggaaaga aattctccta ggtttctagc ttttcttttt |
| 91201 | ttcttagaat gcctggattt cctttacatt aatgaaggat atttttattg aacataaaca |
| 91261 | tctggtagac catttctact tttgagcact ttaaatattt gtgctccttt ctactgttat |
| 91321 | ttctggtttc tggtSataat aaccactatt atttatattg cattttccct ataactatga |
| 91381 | tgtcatttcc ttctttctgc tttcaatatt ttgtctttaa ttttcagaaa ttggacaatg |
| 91441 | aattttcctg gaatggattt cattggttgt attctggttg ggatttgctc agcttcttga |
| 91501 | atcYgtaggt ttatgctctt tgctgtgttt ggaaaatttt tgatcattat ttctctgagt |
| 91561 | cctttttcaa catcaacctc ttctgctttt ctgaaactca gaatgcatga atagtacaYc |
| 91621 | atttgttata gcctttcata ttcatgatat gatgtataat tttttcaatt attttaccct |
| 91681 | gtattgttta gagtatataa tttctattga tccaacctca agaacactgt ctttcctcca |
| 91741 | tcattttctt tatgctattt atcatgccca ataaaggttt tttaagacat tatatttttc |
| 91801 | atttctaaaa tatctgtttt cttaatttat aatttataat tcctattttt ctgctgacaa |
| 91861 | gtttttcctt tccattcatt ttgagtgtct accttgacct catgaaggat gggtacaaca |
| 91921 | gctcctgtaa agtctttggt cattttaata tctaagtaat ttcaaggttg taatttcttg |
| 91981 | attgtttcat tccttgagaa atggtcgatt ttttgtgagt tgttttgagt acattgagta |
| 92041 | attttctgtt ttatcttgca cagagggatt ttctcttttt gcaatacaca aaaagcccaa |
| 92101 | taagggtagg ttcggacatt ggagggtgaa ggcactcatg gtaaattatg ctccaccaac |
| 92161 | tggctcaaat ggccagggag tttgtcccac taacattttt ggtggttttc cctgggtcaa |
| 92221 | tctctctggc acttatgaga taatatttta agtatttaat atcacaccat acatacagat |
| 92281 | ataaagacaa taaaaagcag tgcatcgaat gggtccaaag ggccctatcc acaaagtctt |
| 92341 | cctaactttg gtgtgtgtgt gtgtgtgttt gtgtgtgtgt gtgtgcactg tttgttcaat |
| 92401 | cctcatcagt tgaactcagg cacttctttt tcctttttct ttctaaacct gcttgttaga |
| 92461 | ggctgtcaca gtagccagaa ggccctgcta tcttctattt gagtatttat agaatgcagg |
| 92521 | aaaaaagagg gtaaactata aagaacgact gtaggcctcc ccggtgcagt ggctcatgcc |
| 92581 | tgtaatatca gtacttggag aggcagaggt gggaggactg cttaaggcca ggagttctag |
| 92641 | accagcctgg gtgacatagt gagactcctc tgtctttaca aaacactaaa aaattatcca |
| 92701 | ggcatgatgg tgtgtgcctg ttgtcctagt catttgggtg gctgaggtgg gaggaaaaga |
| 92761 | agggaaggaa agaggagggg atgggagggg aggggagggt tggctttttt tttttcctct |
| 92821 | tggcttcttg cccttctttc tagtgcacct cccagtaggg tctcttttgt atttcctcac |
| 92881 | atgctattgt cctccatccc tcagcacccc ttcccccaac ccccagaacc aagtagaatg |
| 92941 | gtgatttgtg cacatatatc caacagggct atactaattt gagtccctac tctccttgaa |
| 93001 | gctttgcaat atgttgggat ggttctgtag ggtctttggt gtcccttggg tcaggaagat |
| 93061 | ctcaggccca gcccgaatcc ctaaagcaat tgacatcaga atagaggtaa agaagttatc |
| 93121 | agggaaatat agagaaagtg tcttcaggcc agtatgcaag acacatttac tttcaaataa |
| 93181 | gcattattgc cactactcgg tggttaactg aataagcatc tgaatgtaac aactttggga |
| 93241 | gatccttaat cttttcacct ttccaccaaa ggcctgtaac aactttggga gatctttaat |
| 93301 | ctgtctacct aatgttatct ggagaagaca gctaaatcta aaagtgtcat ttggaagtct |
| 93361 | gtttcagttc taccagtggt actcaatttt caaccacttc ccaatcctcc tcattaatga |
| 93421 | gcaacataat agaagaatat ttatttacca attacaaaca ttttagtcaa catgttagct |
| 93481 | accagttccc atggactttc agcaaatcct attaatcagc ttgtaggatc cttcactttc |
| 93541 | tcctcagaag gccaggtctt tgggctgtgt tccatcctcg ttgccaaaat tattataagc |
| 93601 | taacaactta gcttgtcact tgttgtactt gcagaaggca aaagatggtt tattattcac |
| 93661 | tgaagtacta gcagtagtca gaggaatatc atcgtactat ttcttcaagc ttcaRtcccc |
| 93721 | tcacagggat aagatgagaa actgatgtta catgtgcaag tagtggtgtc tatcaaaaga |
| 93781 | gaaatctcaa aattaggaaa ctccagtctt aaaaactttg atcactgtga gtaacctgtc |
| 93841 | catcttgcct tctgaagaag aagctttaca ctggaatgta agcaaatatc tctggagaga |
| 93901 | agaagaagaa gagaagagtc tttatcttta aacaaatctg ccttYtgacc aagagggata |
| 93961 | ccctatttct aaatcccaag gctctttgcc atgacctggt cttgggcaaa gtgaacgaga |
| 94021 | ctcctagggc acaaaacgta aaaaggcatt caataggttg cagggcccta aaaccaagtg |
| 94081 | gctcctcaaa ctttgcaccc tgcatgcctt gctcacctga tcctagttga ggcccttctg |
| 94141 | tttgctcatc aaacatactg tttgctcaca agataagagc tagaccatgc agaagtgcaa |
| 94201 | tacattcatg gagaattttt ttcccaacat ccatYcccaa gatcaaggtt acacagttgc |
| 94261 | caaagattgt agagtattct gaatatatca tctattttct tcctggacag aactaaatcc |
| 94321 | atcagaagta acttttttaa aaaatgtttc tttcttttgc atacaatttg tttttatttt |
| 94381 | agattaagag atgagtccag aggtaagggg gacaggagaa ctgtgacatc agggatgaca |
| 94441 | ctaccctttg agagcactgg agcagttaga aaggattgaa agtgaataat cttatttcat |
| 94501 | aaggggtatg tcattttatg attcaaatta agtctgtgat tatcacttag caaaattgct |
| 94561 | aaaatcatta tcagaatatc ccatatcatg ataggaggaa gaaaaagaag taaaatctaa |
| 94621 | aattgttatg gaggtaaata gaagactgcc ataaacaagc tatctacaga attatggggc |
| 94681 | ttaggaattc acagtaccct ataaacaaga acacagcttt gagaatttct atactctaat |
| 94741 | ttttaaaaat gaagtatatt ttgtgaattt ttcacccaca aattatttta actggaagcc |
| 94801 | atcacagctc attaatcagc aattggtgaa ggactaaagc agcccaaatc attcctgtct |
| 94861 | caaagtaagg cctgcttgta agcaagtgtg aactggggat gtatgtgcag aaatcagagc |
| 94921 | ctaagtatgg taagctggac atttcagaga taaggaaggc agctggtgtg tgtgaaatct |
| 94981 | tatatcaata actgatttta ttttttcagt cctaattgct attatggaat ttgtgctttt |
| 95041 | cattattaca tcttcacaaa gcatgatttt taactttaga acaatttaca ttttatgctg |
| 95101 | gataattctg ttgtgaggga ctgtcatgtg cattgtgaga tattgagcag catccttgtc |
| 95161 | ctcgtacagt tatcaggtaa aatacagagt gtgtcagttc aatttgaatt tcaaataagc |
| 95221 | aacaaataat tgtcattgtc tgtgtatcca attatcaatg ctgcaggtct gtaattggtc |
| 95281 | ctccatagca cacttacatt atgatgtaaa ctcatattat ggttatcaca agtaatactt |
| 95341 | atttataaat ttattcttgt tgttttttct tttgtctgaa atgtaaattt aactaggcct |
| 95401 | cctatatttt tatttgctta atctgttaac attacaatag atgccagcag catccgtcca |
| 95461 | attttaactg aaatgtctcc aggcattatt aaatgtcccc taggggggca aaattgccct |
| 95521 | gtgtggagaa ccactgtcct aaagggattt catcctttgc acatggaaat ctcgtggtct |
| 95581 | attctctgga tattttaatt ttattcacac atttaaaatt tcgttttagg cctgcaatgt |
| 95641 | ccaggttatt tttctagggt ttactttttg ttctatcgat taccatataa ttaacttttt |
| 95701 | aaaatacttt ctgcaatgtt gaaaatttgt cttttgtctt tactgctgaa aattatatta |
| 95761 | tttgcttgca atatgttctt ttttttctta gagagaacgt aattgttctt caaaatctgc |
| 95821 | ttccaattat ttcattttaa atatttatta Ytgttacctt aaacttgcga ttgtgttctt |
| 95881 | ttatttaacc tgctattttt acatgctttc tcattacatt tttaagagga gacgttctta |
| 95941 | ttaaattcaa ttctgtaaac tgattggtta tccctgattt gtttttcttt tcaaaacttt |
| 96001 | atttattttt ctttctttac acagtgactt tcatcaaatg agatcctgta tttgttacta |
| 96061 | tcgtcttggt cttctatatt tttatttact aaacctggta actctacact agatgccagc |
| 96121 | agcagtcctc caattttgct tacttaaaat cttactgatt ttttaatacg tgtccttgcc |
| 96181 | ttccttacac agttaaccaa ttgagtaaaa ttttattgtt agtccaaaga ttcagattct |
| 96241 | acagtacaag tctgttgtag atggtcaaga ttgtaacatt tttgatggtc aaagttgctt |
| 96301 | agtgttttta actgaaaatg actgaaaata ttaacagaat agggcttata tttggaaata |
| 96361 | actcttagtg atgtacattt caattgactt tgtttcatat cctcaaagtt ttcactaagc |
| 96421 | tgtagactct actaactatt ttcatttgag ttttcctttc tagttttaaa ttatcaattg |
| 96481 | atcatcattt ttaggatagg aactaaatcc ctatgtgttt gtacatataa atctgatttt |
| 96541 | atatacactc tatacacata catagatatt ataattcttg atgtatttct attctattct |
| 96601 | aatgcttatg caacatatta ataaaattta aagatagagt aatctattat attgatcaca |
| 96661 | gtgcctaatg aaaaatgcat tttcaatata ttagaatttt actattaaat acataatctc |
| 96721 | catatatggt gcaaacaagg tagcaatctg ttctgcttaa tttaaatcag caagtatttt |
| 96781 | caataatgct caatatatca tagaacataa tgagaaaata agaggtaggt gaaagaaaca |
| 96841 | aatgtgtagc cctcctgttc ttcttccttt ttttctttct gagaatatca tcactcatat |
| 96901 | caggcatgtt tataaaaatg agagattatg tcctttttgg catacttcat cttcttcagg |
| 96961 | acacagagag aagcttgctt cagtttgctg tcccgtaaaa ttagaagaaa tgaatggcca |
| 97021 | gatggatgga aaaataccag cacactacta aaagtccttg ccgcaacgaa gtctagaaga |
| 97081 | ggacaggcca atgttagtat gatactgatg aaataatgca caataaagag gagtagaaat |
| 97141 | gaaattatag cttttatagg ttttacatgg gcttctgtgc tgggatccct ggaataaata |
| 97201 | ccatgtagct tcatctgcct ggtgtggctc cataaggaga ggattaagag aagaatggaa |
| 97261 | gccagtgttt ccacaaaagg aaggatgaac atcatctgaa ggagaaacag agaagtgaaa |
| 97321 | tcatgcatgg tatccatata attaaatgtc aagttgcctt ttattgttac ccgttcttag |
| 97381 | attaaactat taattattat ttccttcaga atggaagttg tgcagaaaga gatcgttgcc |
| 97441 | tctagtacaa taaagagaag caccttgtga attttccatt tcatccagag gaaaatggga |
| 97501 | ttggagaagt tggctacctt gaggaaatag aagacactga ggcaagtggt acaggacagg |
| 97561 | cagaaatagc tggatcctgt ccagagaatg tcaaaactta ctgcaagatt cttagaatca |
| 97621 | ggcattttct catagcctat attgaaagag gtagctaaaa ttgttatcta caggaaacat |
| 97681 | atcctggaga tggccaagca gttgagaata aaatcaatca gggagacctt tcagttcctg |
| 97741 | attcagtcaa tgatattaac caatacaatg aatcaatttc ccacagtccc cattatgaat |
| 97801 | tacactacaa gaattcttat aaacagtgtc tcccaaatgc ttgacatgcc tctacatagt |
| 97861 | gaatctctgc cttcaataca ccattggctg attgatccta gctgcactgt tatagattta |
| 97921 | tatatccaaa ggagtgactt ctttctgttt tattgatggc cattggtgta gtctggagag |
| 97981 | atccaaggtg tgttctaaaa ttagatttca actaaattgt aaaatataca agtttttttc |
| 98041 | ccttgagggt atcagctagt gattttcaag gcaaatatta tattccctgc tactattgac |
| 98101 | tctggttgta ttttacatgg aaagttctgc attcaaattt gaaccctcat ttgttaacat |
| 98161 | gcaaaattga agtagattct cctttatagt tttacaatgc catcttttgc ttaaaggtta |
| 98221 | ttcatttgta tgatgtatcc ctttgattca tctaccaccc tgggctagaa attctaagcc |
| 98281 | cccatataga aaaatgcagt atatatttag agtttatgat cagcatattt cttcattatc |
| 98341 | aacctcacta atgcagatta tttataaaat atgcaaagtt taagaaaatg gagaaaactg |
| 98401 | ctctctgata taataccaaa tcttttagag agtatggaag tttttggcca ggcacggtgg |
| 98461 | ctcacgcctg taatcccagc actttggaag gccaaggcag gtggatcacc tgaggtcagg |
| 98521 | agttcgagac cagcctggcc aacatggtga aaccctgtct ctactaaaaa tacaaaaatt |
| 98581 | agctgggctt ggtggcatgc tcctgtaatc ccagttactc gggaggctga ggcaggagaa |
| 98641 | tcgcttgaac ccaggaggca gatgttgcag tgagccgaga tcacactact gcactccagc |
| 98701 | ctgggtgaca gagtgagatc cgtctcaaaa aaaaaaaaaa aagagagaga gagtatgcaa |
| 98761 | gttttaaaac atacgataca tactttggca cttcttctat tgatatctta ggagtctgtg |
| 98821 | tactctgtcc ttaaatctag aatggtttgt gactaattca actaataaaa atgctataat |
| 98881 | aattctaaag ctaaatcatg aaaagccatg cagttttttc ttaatcactg caatatttac |
| 98941 | tcttggagtc ctaagccaca tgtaagtagt ccaactactc tgaggtcaca atgtccaaac |
| 99001 | ccacatgcag aggccatgtg caggccctct ggctcattat cccacgtgag cccagctttt |
| 99061 | acgtcctttt accccaggta ctaaacctat gagccaagaa agcgatattt gacctgtctg |
| 99121 | atacggtaga tactagccac atgtcacacg tggcttttta aattcacatt aataaaaatt |
| 99181 | aaataagatt aaaagtacag agcctcagta ttactaacca tatttcaaat gctcactagc |
| 99241 | cacgtgtgac tattttatag ccaacataca taggggatat ttctatcatt gcctatcatt |
| 99301 | gacatttcta tgtatttctc agctccgcct tagataagtt cagcccctgg tcacttgaat |
| 99361 | tgcccccagt tgttcataac tttctggcta aaggcttaga cattctggaa caaaaagaag |
| 99421 | ccatccctgc tatgtcttga acaaaaccct aacctacaga atctttaagt gaattagtct |
| 99481 | attcttgcat tgctataaag aaacacctga aactgggttt ctgtaagagg tttaattggc |
| 99541 | tcatggcttc acaggctgta caggaagcat ggcggcatct gtttctgggg aggcctcagg |
| 99601 | aaatgtataa agatggcgga aggcaatggg gaaatcagat acatcttcac atggttggag |
| 99661 | caggaggaag agaaagatgg gggaggtgcc ttacactttc aaacaaccaa atcttgtgat |
| 99721 | aactcactca ctcactattg ccacaccacc accaaggggg aaactgcccc ccataatcca |
| 99781 | atcacctccc accaggcccc acctccaaca ttaggggtta caattcaata tgagatttgg |
| 99841 | gcgaggacag aaattcaaac catatcaaca agcacaataa aatggctgtt attttacacc |
| 99901 | atgaagtttc tgggtgattt tattatgcag caatagagca tcagaataga attatttagc |
| 99961 | atatgaatgg tatcaatatt ttgtcatttc taatttccat gtctgttttt ctcttctatc |
| 100021 | ccaaataaag gtatccatag catctttatt ttcctcagtg taaggggaac ttgtataaat |
| 100081 | tttctataat tttttcatac gttgagctga acttaatctt aattctgatg aggtcaaacc |
| 100141 | aggaaaggcc aattagtcat gttctttgtg taatgcaact gctgcatttc cctcccaaag |
| 100201 | tagctagtcc aaaatttagt gacattcaaa accaatggag atataatata ggcctaagag |
| 100261 | gagtcaaaga aatgaatgag ttggacagcc caccaaaaga tacaccctag gtaaattcac |
| 100321 | aaagaaaact ccatgactaa aagaaaggct aattgtgata ggcaaacatg aaatgcaaac |
| 100381 | aaaactgaaa ctgaaataaa caaagggaaa ttcaggaaaa tattatatgc tgaaaaaggg |
| 100441 | ttattttatt tgtcttattg aatatcttct ttgttccagc cctctaggag gtgggatgaa |
| 100501 | gcattaaata caactatttt taaatgccct taataagttg acattctgaa aagatgaact |
| 100561 | ctaaacatat aactaataaa atatatatca tacagatata aaatatagtt tataagaagt |
| 100621 | tgcaaatata agtagagagg gtcaatagaa agcatgtcag aagaggggtt gaaattttaa |
| 100681 | ataaggtgct tagggaagga ctcattgaga aggtgatgtc tgaacaaaga cctaaagtag |
| 100741 | gtaaagaaat tatccatgtt ttgtctgggt aaagtacatt ccagacacac ggaacagcat |
| 100801 | tatcagtgtg ctaacattgg atgtacctag tgtgtctgag gaagaacaag gaaagcagtg |
| 100861 | tgactgttgc ggagatgaga gagtgagacc actaagagtg aagtctcaga aagaagaggc |
| 100921 | atgtgcccag aaggcagcac atacagtcaa aagagattat tttagaacgt taatatttaa |
| 100981 | cgcctgccct gctgtgtttt gtacttgcgt ggtgcctact gctcctctct tgtggctgat |
| 101041 | ttctcccttt tggaatgaga atgtctatcc aatgcctgta caacaactgt atcttggaag |
| 101101 | gaaataaatt gttttttatt tcacaggctc atagctggaa ggaacttgac ttccagtctc |
| 101161 | aaatgagact ttggacttca gacatttgaa ttgatgcagc aacgtgttaa gaattggggg |
| 101221 | actattgttg ggatggaaag attacatttt tttttatgtg agaaggacac gagttttcag |
| 101281 | gggaccaagt cagaatgcta tggtttgtac acggtttgtt tgtccccatc agaactcata |
| 101341 | ttgggatttg atccccaaag tagtggtgtt gggaggttga gcttagtgag aagtgtttga |
| 101401 | gtcatagggt tggttccctc atgaatgcct tggtaccatt ttcaatgtag tgagtgagtt |
| 101461 | ctcactctca caagactgaa tttgttctag gggaatgagt tgtttttcat gagagtgaat |
| 101521 | tgttataaag ccaggatgcc cctttggttt attctctctt cacatgtgcc cgcttctgct |
| 101581 | ttgaccttct ccaccatggt ttgacccagc acaaaagctc tcagcagaaa ctaagcagat |
| 101641 | gctaatgcca tgcttcttgt acagcctgcg gaaccatgaa ctaaataaac ctcttttatt |
| 101701 | tataaattac tcagcttcag gtattccttt ataccaacac aaacagacca agaaattgag |
| 101761 | gaataatatt tataaaatta tttcagtgaa ttaaattaga taaaatggac aaattccctg |
| 101821 | aaagaaatta ctgaatcagg cacacaaaga aatagaaaat cttagtgtct atttttaaaa |
| 101881 | attgaattct taatttaaaa ctttcacaca aagcaaggga tgacctgaat gtttattttc |
| 101941 | atcacatatt taagaagaaa aaaataccaa cctacataaa tttttcaaca aagtctcata |
| 102001 | aaggttaact ctgtgagctt tatttcaaga aggaaagtgg gaatctacca gaatcataag |
| 102061 | gacacacaga tcccagggag gggaacatgg gcaaacagcc cccatgatgg cacccagtta |
| 102121 | aaaaagtgaa tgaagctcca gtaggtgaga gaggcagaga gcctccctct gtgactcacc |
| 102181 | tttccactgg ggatctgagc aacccagtgc tcagagggaa gagtaccttg tttctccaaa |
| 102241 | gccctggaga taacttggag aaaggcttag agacattgta agggaaagac actgggaaaa |
| 102301 | ggttcaggcc ttttctcaga cccaggactg agagcaggat accattttta attcagatgc |
| 102361 | cacaaagtca atcattcttt ggtaactaag cagcgtagct gtgcaggcat tttagtcttg |
| 102421 | ggccagatat tggagcacct gctttagagc agggtgggga cctccatggc cagaattgtg |
| 102481 | gggaaaaaaa accttagcag caaacactga aactgtgcta tcccccatca caggcctggg |
| 102541 | gcaggagggg agctgctaca gccagtttat cctatgtgat gagacttgca accaggcagc |
| 102601 | ttagctactt ggaactagtc tgtgtgtgtc attgctgggt accccaccct gttcccctgt |
| 102661 | gattgtggtg cagcagactc tcctccactc tacctctagg cagaaatctg ggcatttgga |
| 102721 | tcactcattc acctggttca gcagcttcat ctgctccacc cttcttgtgc agagatccta |
| 102781 | gaatagggag gccctctctg cttcatgcct aggcagatcc caggattttg gagcacctgc |
| 102841 | tagcaaggtt cagcaccctg aaccacctaa ccttccttga cgtaggtcat ggtgcaatgg |
| 102901 | ggccctctct gctccacagc caggcagaac tctagatatc tgaagcaccc attcacctgg |
| 102961 | ctcagcagcc tatcctcccc tacccttcct gtgcagagat tttgatgcag ggaggtcctc |
| 103021 | tctgctgcat accctagcat tcaaagcacc tgctcacaca gactggcaac ctgtgctgcc |
| 103081 | tcacccttcc cgttcacaga tccatgtact gggctgatcc tctctgtttt atgcccaggc |
| 103141 | aaatatccaa gcattaagag cacctgcctg cctagttaag aagcctgagt caccccattt |
| 103201 | accctgtgca gaaatcttgg ttggtggggg tgggttctgc tccacaagca ggcagatttc |
| 103261 | caggtattca gagcccccac tctcctggat taagagttta ggccaatctc tccaatatcc |
| 103321 | ctgtgcaaag aacttggagc cgagggggtt acctagctcc acccctagac agaactctgg |
| 103381 | tcacttggta gccactcagt agattctccc tcagtgttgg tgcttgtgtc tgccattgga |
| 103441 | agacctatag gtggacctgc cttgtctggc cccacccacc ttgctcccca caacccccaa |
| 103501 | ggctgagcag ggagttcaca ccactgtgta ctccatgagt cagaccatta tctgcagcaa |
| 103561 | cagagagttt cttccagtaa acaaggatca aatatataac catcacattg tccaaaactg |
| 103621 | gctcttacct ataagtgcca tctactggct tgtaggttga accgcacagt ctaatataaa |
| 103681 | acctgcaacc tgtaagtgca taaggctata gaagctgggc aaaagaccta cccagaattc |
| 103741 | tctaaagtca tacctcctaa ggagggaggg ggaatggaaa gggaaagaaa aaagaacaat |
| 103801 | aatattatag ggaaataaag aaaaaaatcc taccttatgg aaataattac aaaaattaga |
| 103861 | agtgccagta ttgccagagg aggaggaaag agaacaagaa ttctaccacc ataaaaaaag |
| 103921 | tgaatgtaat gaaatcaaca ccatcaaagg agcacagtac ctctccagca atggtcccta |
| 103981 | accaaaacaa aagctcagat atgacagata aaaaattcaa agtatagatt gcaaggaagc |
| 104041 | tcaatgagat gcaagacaag gctgaaaatg aatacagaga gatttctaaa gcaatccagg |
| 104101 | aaatgaagga agacataaac atcttacaaa gaaatcaatc agagcttctg gaattgagaa |
| 104161 | acttacttaa ggaattataa agtacaattg aattcatata aagtacaatc tctcatagac |
| 104221 | tggaccaagc agaagagttt cagaccttga aaactggtct tttgaactaa cccagaaaaa |
| 104281 | aaaattaaaa ataatttaaa aatatgaata cagtcttaga gcaatatggg attatgtgaa |
| 104341 | gcaaccaaac tcataaactg ctggcattcc tgagaaagaa ggagaaatag ttaataacct |
| 104401 | ggaaaacata tttgaggaaa taatttaaga aaatttccct aatcttgcta gagaggtaga |
| 104461 | catacagata caagaaatca agaggacacc tgactgatgc tataggaaat gaacatcacc |
| 104521 | aaagcatata gtcgccagac tatccaaggt ctacactaaa gaaaaaaatc ttaaaggcag |
| 104581 | ctagagaaaa agatcagatc acatacaaag ggaaccccat aaggccaagt atatagctca |
| 104641 | gcagaaacct tacaagccag gagagattgg aggcctactt tcagcattct taaaggaaag |
| 104701 | aaaattttcc aaccaataat tgtatattcc atcaaactaa cctttataac tgaaggagaa |
| 104761 | ataaaatctt ttatagacaa gcaaagggta aaggaattta ttaccactgg accagtctta |
| 104821 | caagagatcc ttaagggagt tctaaacatg aaaatctgct accaaaatag cacacctaag |
| 104881 | cacatagccc aagaccctat aaagaaacca cacaatagaa actacaaagc acccagctaa |
| 104941 | caacttcaaa atagaatcaa aacctcacat agcaatatta gccttgaatg taaatggtct |
| 105001 | aaataccctc acttaaaagt cacagagtga caaattcaat aaaaaacaaa agtcatcggt |
| 105061 | ctgctgtctt caagagaccc atctcacatg taatgttact gttaggctca aagtaaaggg |
| 105121 | ttgtagaagg atctgtaaca caaatagaaa agaaaaaaag aaagaatcac tattcctata |
| 105181 | taagataaaa cagattttaa accaacaaca gtaaaaaaat gacacagaaa ggcactacat |
| 105241 | aataataaag tgttcaattc aacaagaaga cttaactgcc ccaaatatac atgcactcag |
| 105301 | cattggagca ccaagattca tgaaacaagt acctccaaac ctataaaaag atttagatac |
| 105361 | ccactcaata atattggggg acttcaacac cccactgaga agattggaca gatcattgag |
| 105421 | gcagaaaact aacaaggaaa ttctggactc ttgaaaaaac gctcaaataa ttaggcattg |
| 105481 | aaggaacata cctcaaaata ataagagcca tctatgacaa aactacagct aacattacac |
| 105541 | tgaacatgca aaaactgaaa gcattcccct tgagaactgg aacaagaaaa gggtccccac |
| 105601 | tcccatcact cctattcaac atagtattga aagtcctagc caggacaatc aggcaagaaa |
| 105661 | aaaaaaggca tccaaataga aaaataaaag ccatagtcaa actatatctc tttgctgatg |
| 105721 | tgaatccata catacaaaac cctaaagact ctgccaaaag gctcctggca cagataaagg |
| 105781 | acttctgtaa agtttcagga tacaaatcaa ttcacaaaaa tcagtagcat ttctatacaa |
| 105841 | taaaaatctt caagctgaga gccaaatcaa gaatgcaatc ccatttacaa tagcctcaaa |
| 105901 | aaaaaaaaaa aaaaaaaaaa caactaggac tacagctaac caaggaggtg aaagagaact |
| 105961 | gtgaaacact gctgaaagaa atcatagatg acacaaacaa atggaaaagt attccatgct |
| 106021 | catggatagg aagaatgaat attgttaaaa tggttgtacg gcccaaagca atttacagat |
| 106081 | tcaactctat tcctatcaag ctaccaatgt cattttgcac agaactagaa aaaaaaaact |
| 106141 | attttaaaat tcatataaaa ccaaaaaaag agcccaaata gcaaaagcaa ccctaagcaa |
| 106201 | aaagaaaaaa gccagaggaa tcacattacc tgacttcaaa ctatactata aagctacagt |
| 106261 | aaccaaaaca gcatggtaat attataaaaa cagacacata gaccaatgga acagaataga |
| 106321 | gaacccagaa ataaagacac acaactacag ccatctgatg tttgacaaaa ctgacaaaaa |
| 106381 | taaacaatgg ggaaaggact ctgtattcag taaatggtgc tgggatatct ggctagccat |
| 106441 | aagcaaaata attaaactga acctttacct ttcaccatat acaaaaatta actcaggatg |
| 106501 | ggtcaaaaat ttaaatgtaa gactttatac tacaataatc ctggaagaaa acttaggaaa |
| 106561 | cacaattcta aacattggcc ttgggaaaga atttatgact aagtccccaa aagcaattgc |
| 106621 | aacaaaaaac aaaaattgac aagtgggacc taattaaact aaagaatttc tgcacacatt |
| 106681 | gtataaacta tcaacagagt aaacagacaa cctatagaat gtaagatttg caaactatgc |
| 106741 | atgcaacaag ggtctaatat cccaaatcta taaggaatgg aaacaattga acaagcagaa |
| 106801 | aacaaataac ccctttaaaa acgagcaaaa gacatgaaca ggcacttttc aaaagaagac |
| 106861 | atacgagcag ccaacaaata ttttaaaagg ctcaacatca ctaatcatta gagacacgca |
| 106921 | aatcaaaacc acaaagagat accatctcac accagtcaga atagctacta tcaaaaagtt |
| 106981 | aaaaaaaaaa aaacagatgc tagtgaagct gtggagcaat gggaacgctt gtaccctgtt |
| 107041 | ggtgggcatg caaattacgt cagccactgt agaaagcagt ttggagattt ctcaaagaac |
| 107101 | ttaaaataaa ctaccattca acctagtcat cccattactc agtatggtgt atgcacgcca |
| 107161 | cacttttttg gtctaatcca tttttttttt tttgagacag agtttcactc tgttgtcctc |
| 107221 | tcactctgtt cacaagaaaa taaatcattc taccagaaag acacatgtac tctcacaatt |
| 107281 | tcattggaac actattcaca atagcaaagg catgggaatc aacctacgtg cccatcaaca |
| 107341 | atggattaca ggccaggcac agtggctcat gcctgtaatc ccagcacttt gggaggtcaa |
| 107401 | ggtgggcaga tacctgtggt cagcagttca agaccagcct ggccaacatg gtgaaactct |
| 107461 | gtctctacta aaaatacaaa aattagccgg gcgtcctggc acctgcctgt aatcccagct |
| 107521 | acttgggagg ctgaggcaga agaatcgctt gaacctggga ggtggaggca gcagtgagct |
| 107581 | gagatcatgt cactgcactt cagcctgaga aacagagtaa gattctgtct caaagaaaaa |
| 107641 | aaaatggatt agaccaaaaa agtgtggtat atatagacca tagaatacta tgtagccatt |
| 107701 | aaaaaaaaat gaaatcatgt cctttgcagc agcacggatg cagctaaagg ccattgtcct |
| 107761 | gagtgaatta atgcagaaac agaaaaccaa atactgcatg tttcacttat aaataggaac |
| 107821 | tatacaattt taactaacac tactaagtga tagaattgag aattgtacct ctgactccag |
| 107881 | actcagtcct taactattat agtgtttttt gtggggacca tatgagtgca gaggtgaaaa |
| 107941 | tactgacaga tattgaaaga tgctattggg taaataaact acaagagagt tcagagaaat |
| 108001 | taatgataaa aatgatcata ctactcctct cacttaccta acttttaagc aaacccattt |
| 108061 | gggaggtcct ttctaaaaag aaaataaaag agagaaaatg agaatgctca agtagatagt |
| 108121 | actattgaaa caggttacta aaaatgcatg tggtatcacc aaagaacctg ttctgacagc |
| 108181 | agagaaaatg aaattaggct ttctgtcctt atactcaagg ataactgtgc cttattgcaa |
| 108241 | atatttattc caactgttcc ataaaatatc tttgagtttt gaaagcaaaa aaagttaaaa |
| 108301 | ataattttct tacaggaaaa tagttgatta ttgaacttca ttaaaagttt ttaatgtcct |
| 108361 | ctctttgaaa gacactgtaa agaaaatgaa atgacaagcc tctggctggc agaaaatatt |
| 108421 | tataaaacat atgtctgata aagaacttat attcagaatg atatggtctg gctgtgtccc |
| 108481 | cacccaaatc tcatcttgaa ttgtagctcc cataattccc atgtgttatg ggagggactc |
| 108541 | agtgggagat aattgaatga tgggggtggt ttcccccata ctgttctcat ggtagtgaat |
| 108601 | aagtctcatg aaacttgatg tttttataag gggtttcccc tttcgcttgg ctgtcattct |
| 108661 | ctcttcactg ccaccatgta agacgtgact tttgtctctg ccattattgt gaggcctttc |
| 108721 | cagccatgtg gaactgtcag tcaattaaac ctctttttct ttataagtta cccagtcttg |
| 108781 | agtatgtctt tatcagcagc atgaaaatgg actaatacag agactatata aagaacattt |
| 108841 | acaactcagt aataaaaaca gaaagcaatg aatcaagcta agtagttggc aaaaggttta |
| 108901 | aacaaacatt tcataaaaag aggttgtatg aatgacccaa agcatatgaa aaaatcatca |
| 108961 | gcctcactag ccattaggaa aatgtgaatt aaaactatga tgagatgcca ttacattctg |
| 109021 | actagaatgg ccaaaataga aaacaaaaca gagtacctac caactgttgg ccagaatgtg |
| 109081 | aaataactga aacactcgta tattgctggc aatagtatga aatggtgcaa ccactctata |
| 109141 | gaactctggc agttttttct taagttaaac atacacttat catatgattt gacattttta |
| 109201 | ctcataggta tttactcaag agtgaggaaa ttgtatatcc agaagaagag aaatacatga |
| 109261 | atgttgatat cagttttatt tataatggcc aataattgaa aaccatttga atgttcatta |
| 109321 | acaggaaaga gaaatttttt aatgtggtat atccaacact actcaggaac actgctcagg |
| 109381 | aacaaactac tgattaatac aacaaaacag aagaacttca aaaacattat gctgagttaa |
| 109441 | agaagcctca catataacaa tacacactct ataactgtat gtgtgtgtgt gtgtgtgtat |
| 109501 | atatggcatc tatatatcta tatctataga tatatagatg cataaaattc tagaaatcaa |
| 109561 | aaactctctt attgttacca aaagcagata agtagttgct tgggaaaaag ggctggaggg |
| 109621 | gagagggtaa actgcaaagg gcactgacat tgtggtcaca caagtgtata cattgtcaaa |
| 109681 | actctaactg aaatgtggac taacatgttg cattttatta tatgtaaatt atacctcaat |
| 109741 | aatatttact ttaaaaggca taatgtaaaa tatgtatgta cacatacata caatataatt |
| 109801 | actaaaaaac cgttatcttt ttatgtggca gttactcata ttaaactttt taaccctctc |
| 109861 | aattctctca acacatcagt atagtaatag tggcaagtcc aaacttccct aattctattc |
| 109921 | caaataactg ttctaattat ctgtagctca ccatttaaat aggagtactt gagataataa |
| 109981 | aataattacc taaatcaccc atctcaatga atgatttaga attgaagagc cattgccaaa |
| 110041 | caaaagattg tagatttaca attaacatct aagtatgctg tagtatatgt ttttaattta |
| 110101 | caatagaatc tgccaataat ttcctcaaat aagtttcaaa ttcctaataa tgtagaaata |
| 110161 | catgtcataa atacataata ttcttaggta agatgctatt atagagaaga atttaaaaca |
| 110221 | tttacagtga ccttcacaat aaaagaaacc aggggaagca taaaatatct tttaaactcc |
| 110281 | ttgtagactc ctgtttctgt ctgcaatatt caataatctg tggtctgaat ggcttatgaa |
| 110341 | attgtgagtt tctcatcgtt tagcccatac cttagctgcc accaaaagaa aggcctgtct |
| 110401 | taacttagcg tttcctagaa tcagaagaaa ggagtggctt gaaggagaga agactccaat |
| 110461 | cgtctcacaa agcatgtaga tcactgtgtt ctgatacagc tcagaaatcc atgatatgag |
| 110521 | aacacataga aagaaactag catagaataa aaggaatgag atcacaattt tcaaggcatt |
| 110581 | tgtatggacc ttggtcctgg ggtctctgtg tcctttgtaa ttgagttgca ttttctggag |
| 110641 | atgtttctgc agggagaaaa ttaacaggag aaaagagatg aaggccacag taaatggtgt |
| 110701 | tagactgaac atagtcatag tgaatttgac cgacactgaa aatgtttcaa agtcactcat |
| 110761 | actgaaattc caagttgtgt ttctttcata tcggtccagc cagtctttta tatgcatgtt |
| 110821 | tatttgtatc agatttaaaa ataagaagac caaggttcct agcagtatca tcagaatcac |
| 110881 | tttgtttact ctccacttca aatagagaaa agcagggcta gagaaactcg ctattttgag |
| 110941 | caaataaaag atgctgaaga ttgtagcaag ccagagattg aagtgattag aaactatcca |
| 111001 | gctaaaaatc ataattctta atcctgttcc agacacaaat atggctagat aatgcagagc |
| 111061 | taaaaaccaa cttactaata tttcccagat cagcccaatt ctggagattg ccaagataat |
| 111121 | gaggagttta tcgactgagg acagctctct tttactgacc cagtcaatgc agttgatcag |
| 111181 | tactataaat ccattgctca aattcccaat tatgaattct gcaattatta caagagtgaa |
| 111241 | gatactcggc agggcacttt ccatgtcaga acagagaaag ttcaatgtct aatgtcactg |
| 111301 | ctggttattc actgatctaa aatgctattc acatccttga gtgtccagtg gagttcttct |
| 111361 | tccttctcct ttttctgctc cttctttcat tgttggctca acgtcaaagc agaaatctct |
| 111421 | aaagtttgct gatcgatctt cacataactg ttctggtgat atctttattt ttcttcaatt |
| 111481 | tctctgctga gccctagcta agatatttat gtcttcacca tgggcagaaa tatttcatag |
| 111541 | atgattatgc agcaaagtta aactcacatt tgcaaccatg caaataaaga tatattctct |
| 111601 | ttcattgttt tgtacttttt tgccttgtct gagcatagaa aattagattc aaccagcttg |
| 111661 | agttctgagg tacaaatatt ataaaaatct gattcataga atatgtagct aaatgaagct |
| 111721 | tttatggcta atagcatagc caatgaagct ttataaaata tgcaaagact tacctatgct |
| 111781 | atttcaaaag agtgctcaat ttcttgtgga gctaaagctg gatctggtca atactgtgac |
| 111841 | taaagagaaa ctcgtttaca aagcatccat ctttctcatt ccctgcctca tcactactta |
| 111901 | gcagtgctca ccaccatccc tccataggca ccaaatgcct tcacatttta tccgcttttc |
| 111961 | ccctcatatt tcttttttaa acttaaaagt gataaaaaaa caaattttac aaaatcagca |
| 112021 | acagctacca aagaaagcag tactatatta catcataact tgcaaaactg aaaaccaagc |
| 112081 | aaagaaatag atacactagt tccccttatc catgaggcct atgtcccaag acccccagtg |
| 112141 | gatgcctaaa acagcagata gtaccaaact ctatatacaa tatatttttt tcctgtattc |
| 112201 | acctacctat gataaagttt aatttgtaaa tcaagcacag taaaagatta caaaaataac |
| 112261 | taataataaa atagaacaat taaaacaata tactataata aaagttgcca ggggttgtgg |
| 112321 | ctcatccctg taatcctagc aatttgggag attgaggcgg gaggaccgct cgagcccaaa |
| 112381 | agtttgagac cggcctgggc aacataggga gaccctgtat ctaaaataaa taaaaattaa |
| 112441 | aaaaataaaa agtaaaaaaa tgtgttaaaa tatatagtgt ggtgtctctc actctctcaa |
| 112501 | gataccttac tgtactgtac acacctattt ttggactgtg gttgaccttg ggtcactgaa |
| 112561 | actgcagata agcggggact aatgtgttca ttgtgaagag tcaaggttcc tcaccccgcc |
| 112621 | ccactctttc aaaaactacc gaaaaaaagt ggattaccaa aattctgaaa acgtggagac |
| 112681 | tcaagaaaga ttgtctaatt caaaattaat ataaataaaa cactttatct tgattataag |
| 112741 | ataataagta gccatttagc tagatgaata caaagctatt tttatttaat aaagatataa |
| 112801 | tttgtgaatt atgaatgttt gtattttatt actcatgcaa tctttattgg gtgatctaca |
| 112861 | gagtactaaa aaatttacaa aataattgca tcatctttaa tgatttgcaa gtttcaatta |
| 112921 | taacttaaaa taggtagata ttttctattt tgttgttata atggtatatt tgtcaagata |
| 112981 | gaatagaaaa tgtctccttt aacagtttgt taggtttgta tatttatgac ctttaaatat |
| 113041 | gtagctatgt ggcatgtggt cttccatttg cattcttgac ccagggctga agagatcttt |
| 113101 | tatacttttt cattttaggg tgttcttcct acctatctag agaaaagggt ttggggatgc |
| 113161 | cggtcacaac ttgataatac cccaaatctg tacaaatagg cctgaggaat ggtactgtac |
| 113221 | ttgctggtat atgaaaaaat accacagttt ttagaacttg tgatataaca catgacaaag |
| 113281 | acatagagaa tggataacag gcttgcggtt ctgagctgca ttttcctggt gtgtttccat |
| 113341 | aagagaaaac atttaaaaat ataaatttaa tcaaagagat gtagtctctc acttctataa |
| 113401 | gagaaagaga atagatgcta gggagcatca cagaaaaact ttttcagcag tctgaactga |
| 113461 | aaaggaaaat gaggcaaagg gcaggaagag gaaacaatga aaggtttgag tatgtaaagt |
| 113521 | attttttaag tcactgatgg atgcagtttg ccaacgttgt gttaggatat ttgcagctat |
| 113581 | gtttttaagg aatattgaca tttaattttc atttctcata ttgtgcctat gagaatttgg |
| 113641 | tattaagatt tagctaacct catatcattt gtttagaaat atttcttttc tctttttcat |
| 113701 | ttttgctgcc tattattgtt acatataaca aatatagaac atttaatgaa gtttaaatgc |
| 113761 | tatagtataa agtgcacact aatttaaaag cctcccatgg caagaaagag aactttgtaa |
| 113821 | accccataac accttatttg ctcctttcta atcacaaccc ctatcttcat tccagaagta |
| 113881 | acaactatct gcaattcaaa tcacgttatt gtttaacttt gtatatttta atttgaatat |
| 113941 | gtatccctaa gcactagctt ggttttgcct ggttttggat tgcacatgaa tggaataata |
| 114001 | ctgtacacaa tatttttgaa tttaactatt tttgatcaat attatgtttc taaaattaat |
| 114061 | catgttgcat atagagatag atcatttatt caattgctgt atagtattaa tggaatgaca |
| 114121 | attcaaaatt tatctagtct agtggaaaca caaagttggt ttattttgag tttggagact |
| 114181 | atgatgatga tgatgctacg aacattcttt aacatgtaac ttattattga gtacatgagc |
| 114241 | atacatttct atgatcttga tctggaacca ttccgttgcc tatttcttct ggtcttgttt |
| 114301 | tggcagttac gactttctag atatttgtca gtttcaatta tttatgtttt catgtaattt |
| 114361 | tgattataat atcatcttat taaattttta ataccaacag aatatatcct ttaaattctt |
| 114421 | catattattt gcttttcttt tcatgattta tcttaccaga agtttgccta ttttgttagt |
| 114481 | ctattcaagt ctgtcttggt cgatcttttc agatgtatta tttttcatta atttcatctc |
| 114541 | ttatattgtt atttaattat ttttacttcc gttgagtatg tttgctgtta tattcctggc |
| 114601 | atacgttttc ctcttagaat ttttcagcat ttctcacaag gttttactat attttattat |
| 114661 | acttaatttt aaatattttc taaatttatt gtgatttttc ttccaccata gactattttt |
| 114721 | aaaatatatg ttcgagtttc catttacata aaattttctc tgctaaaatt tatgttatgc |
| 114781 | atatatggtc aattttgata aatgttttgt gtttgctgaa aataatgtgt atcctgtagc |
| 114841 | tttggggtgc agtgtttcat acatccacta gatctatttg taatcatgtt atttaaatcc |
| 114901 | tatttacctt ttctgagttt tgtcttttta ttctattatt tcttgagatt taatgttaaa |
| 114961 | ctatcctgct atgagtatag gtttatctat gtcttttaga agtcctgtca acttttactt |
| 115021 | tacatatttt gatgccatgc tgatgagtgc atagagcgtt agaattgtag tatcttcatg |
| 115081 | gcaaatataa cctctactca catgaggtga cattatctat tctaatgtct ttttccttaa |
| 115141 | aatctattta gcctcacgcc tgaaatccca gcactttggg aggccgaggc gggtggatca |
| 115201 | tgaggtcagg agatcgagac cagcatggct aacacatggt gaaaccaagt ctctactaaa |
| 115261 | actacaaaaa attagccggg catggtggca ggcacctgta gtcccagcta ctcgggaggc |
| 115321 | agaggcaaga gaatggcagg aacctgggag gtggagcttg cagtgagcca agatcacacc |
| 115381 | actgcactcc agtgtgggtg acaaagcgag actccgtctc aaaaaaaaaa aatctattta |
| 115441 | gtatatatta aaatgattac attagcttat ttttgttagt gttttatggt gtgatttttc |
| 115501 | taaattttac ttttaacttc tctttgttat taggatttag atatatatct tgtacatagc |
| 115561 | atagaggtcg taaaatggga cctagagcta tatgctaaca ttttattcct tgtaggataa |
| 115621 | gaaatgtagt cttgtaggag tcccctctcc cccttgaagt tgtatattat gtaaattttt |
| 115681 | ggtcaataaa atattgtgga aatgacatgt tgcttcagag tgagagcatt tactcaccac |
| 115741 | tataagactg caaatttctc atcttcttgc cttgacactc aaacaagggt caataaacca |
| 115801 | tctatcagcc tggattcttt tgtgaccact atgagcacag gacatgtaac agaaatcaaa |
| 115861 | aacaaaaaca aacaacaaaa acttctccta cgtggagtcc ctgagctttg gggatcttgt |
| 115921 | tagtacagca tagactaagc tatcttggca agtatgagac tggcctcttg aactggtatg |
| 115981 | ttactaaaac aaaacaccta acttatgtga cactggctta atacttgatt cattggcagt |
| 116041 | gagtggcaag aaaaaacatt actgtttact gtaaaacaag atagggagtg gcaaaacatt |
| 116101 | cgatagcagt cacctgtggt tatgtgggag gtaaatcaca tatttgaaag ttttgtaact |
| 116161 | ctagaaaaaa aatataattg aatatattaa tggttcattt gacaattaaa aaaattgact |
| 116221 | ttagaaaata attgcctact gtctagctaa atagcaaaca gagggagatg ctctaaaaga |
| 116281 | aaatgatatt tatttgggag taatattgca atgagaatac atgtgccata gtaaattatg |
| 116341 | tgtgtattca gggacattag aaaagacaag gatttctaaa agaggaagat tacataattg |
| 116401 | ttttgagata attaaccttg gatccaagga tcaggaacaa gggtgacacc tgtctaaggt |
| 116461 | tagacaagga ggttctgagc agatgtcctt gcagaagtat ctttttgtgt agggttgcag |
| 116521 | tggcctttgt gcaatgttgt tgttttgtag agtcttttct ggtagctctt gttataagtc |
| 116581 | gtatttacat taagaactct cccctcatgg ccttctccag ctccatttgt cagagtttta |
| 116641 | acacaagtga cttcattttg attctgacaa ttttatacta ctttgcaagc aggaaaaaaa |
| 116701 | tatatcagaa agaagagtct agaaacttga gattttgcag agctggaaga ggcaactgct |
| 116761 | tctcaacact gaatagtatt tgagtttcta agcctggtta aaactcagcc atggctgggc |
| 116821 | acggtggctc acgcctgtaa tcccagcact ttgggaggct aaggcaggtg catcacaagg |
| 116881 | tcaggagatc gagaccaccc tggctaacac ggtgaaaccc catctctact attaatacaa |
| 116941 | acaattagcc tggcatggtg gcgggcacct gtagtcccag ctacttggga ggctgaggca |
| 117001 | ggagaatggt gtgaacccag gaggcagagc ttgcagtgag ccaagatcat gccactgcac |
| 117061 | tccagcctgg gccacagagt gagactccgt ctcaaaaaaa caaaaaacaa acaaacaaaa |
| 117121 | aaactcagcc ttaagactag gattatctca agggtatggt tgttacatcc atgttaaaaa |
| 117181 | ttctgactag attatattta cagaaaaagg ttcaactgac agttactgct ctttcagttt |
| 117241 | gacaaggtaa tatcaaggca gagtgattaa atatctggtt tcctgaatga agccttacaa |
| 117301 | tgctcaaagt atctgatatt aaatccagag agaaaagcag aggggtgaaa aagcaacaaa |
| 117361 | acacagcaaa tataagaagc agcagactag acaaaaactg tgacttgttt gcttgtatgt |
| 117421 | gaagctgaca ggaattaagt agactaaaaa attgagtttc ttaaaaaatt gtgcttctga |
| 117481 | aagaaatgcc aacccaaact aggtcacacg tgtcaaagta tattaaaatg gaggccaggt |
| 117541 | ctgaagaatc cctaggcaga caaagccagt taggtctcat atgaccttaa aactgattga |
| 117601 | tttacaaaag taagcaaaaa ttaacttgag ctatttttta taaatgccta tagtaaagaa |
| 117661 | aaacagaact taaactcaac caatcaaaga cagccaacag gatagccaaa catttgattg |
| 117721 | gttagctata aagttacctt atttcatctg tcctgtcttt gcttttcttc tttgtctgtc |
| 117781 | ctataaaagc atccccatcg cgttccctcg gtagagctcc ggaaccacct cagtttggag |
| 117841 | ctttccaatt tatgaaccat catttgcaaa taaactttta aaaaacttta gtgtgcctta |
| 117901 | gttgacctta ttaacacatg ttgagctaaa accctgtatt agtctgttct catgttgcta |
| 117961 | ataaagacat acacaagact aagtaattta taaaggaaag aggtttaatg aactcacagt |
| 118021 | tctacatggc tgaggaggcc tcacaatcat ggtggaagac aaagaaagag gaaagggaca |
| 118081 | tcttacgtgg cagcagacaa gagagagttt gcaaggcaac tcccctttat aaaaccatca |
| 118141 | gatctcatga gaattactta ttcattatca taagaacaac atgggaaaga cccgcccacg |
| 118201 | attcagttgc ctcccactga gttcctcccc atgacacatg ggaattactc gggagccaca |
| 118261 | attcaagatg agatttggat ggggacacag aaaaaccata tcaaaccctg ttccagagat |
| 118321 | gcagtttaac atattatgag acaaatggga gctcacagac aatatgagaa tctcttgaag |
| 118381 | attacacttt ttttcctagt tctaaaatta catctttttt aatgagactt atattcttcc |
| 118441 | cccaactcag aacatttcct tgtctttaag ggagacctgc cacagataga gaaccataga |
| 118501 | aaataacagt aacaaccaca taaactgtca tgttagctat gaaaagagtt ggtggaagga |
| 118561 | atgggctctc accaagacag tgaaaaatag aggtaggtgg taaacaaata tgcaaaagga |
| 118621 | ccattcagaa acccaagcaa actatcattc tccccatttt actggtgcta taaatacctg |
| 118681 | aaaaaaagtg ccacagaaat ggattagtgt tatcatcaac aaatatattt gagccgggca |
| 118741 | cagtggctca cacctctaat cccagcattt tgggaggcca aaatgggaag atatcttgag |
| 118801 | cccaggagtt tgagaccagc ctgaacaaca taaaaagacc acctctctat aaaataagat |
| 118861 | aaaataaaat aaaataaaat aaaataaaaa aaatagctgg gcatggtggt gcacatctgt |
| 118921 | agtcccagct acttagaagg ctgagatgga aggattgctt gagcccggaa ggcccaggct |
| 118981 | gcagtgagcc atgcttatgc cactgccagt cagcctgggt gacagtgaga ctcatatata |
| 119041 | tgtatacatt taaatatatg tatacatggg tgagactcat atatacagat atgtatatat |
| 119101 | ttgtacgtat gagataagct ggtgagaatg aggtcattga agcagatatc ctgttccttg |
| 119161 | ccaattaagt cagtgatgaa ttccatagtt aataccacca tgaaaatgtc ctcctctata |
| 119221 | cctggcttct cttcagagag aaaaattcct aattttataa ttttttttat tttcaactaa |
| 119281 | gggattaata caataattaa gggattaaat atttaatatt tattgtttca gtacttctct |
| 119341 | cttgctatgt ccattaattc cattgctcat tgttaatttg ttgttaatta cattaaaatc |
| 119401 | agttcttctg taggatcatg tcatattgat ctttatgaaa tcagagcaat catttttcaa |
| 119461 | atgattcagc tggcaatttt catactaaca aatattttag ttttttataa gagccacagg |
| 119521 | tgataacttt ccatattcaa aagaataccc agtgaagtct agtgttctca gatgcagtta |
| 119581 | cggacagttt tcctttcact gttttcactt gttgcttcac cctaaacttc aatttatgta |
| 119641 | cacattacag tccccaatta ggagactaac aggatgttga agaatggcat tggcaggaca |
| 119701 | tttctgaatt cagtagcagg aatgaactca aaaccagcag tactgagtca gttcttgttc |
| 119761 | tcttctgact gaattcgtgt tcatggaaat gtttctgcaa gactgagtgg tcacagtgtc |
| 119821 | agaaggctcc tcaggttttg cctcttcaca catgtccatt tcccctttga ccttctgcca |
| 119881 | tgtcaagata cagctggaaa gccctcacca gaagctgagc agatatcagt gcctgctttt |
| 119941 | ggaacttccc agcctgcaga aacattaggt ctttatagat tgtccagctt caatattatg |
| 120001 | cagccttaaa aaggaacaag atcatgtcct ttgcagggac atggatgaag ctggaagcca |
| 120061 | ttatcctcag caaactaatg caggaacaga aaaccaaaca ccacgtgttc tcgcttataa |
| 120121 | ttgggaggtg aacaatgaga tcacatggac acagggaggg gaacaacact tagcgggcat |
| 120181 | gttggggcag gacgggggtg ggagagcatt agagaaaaga gttgatgcat gctgggctta |
| 120241 | atatctaggt gataggttga taggtgcagc aaaccaccat ggcacacatt aacctatgta |
| 120301 | acaaacctgc atatcctgca catgtacccc agaacttaat aaataaataa ataatacatt |
| 120361 | tttaaaagat ccacatgatc aaaaatgcaa aaaaaaataa attatccaac ttcaggtatt |
| 120421 | cttttatagc aacataaaat ggactaagac aaaactctgt ggtgaaatct ccaattattt |
| 120481 | gtaagatgaa gtcgtagaaa tgggtgaagt ccaaaaagca ggttataatc tatataaaca |
| 120541 | tttaagactt ttattaatat tgacaaagtc ccctacaaaa tgcatgcacc aatgtaagct |
| 120601 | ctcactagca ttaaacgaga ctgctcgtaa ctttgcacac attataattc tatgtaacaa |
| 120661 | tttacaaaag caaaatgtgg ccaatttgaa atgcaaaata gagcacttgt tattcatttt |
| 120721 | accatagtac tatactaaac ttacgttttt gtttaaatgt gaggctgaat tttttatata |
| 120781 | tgataatctg gtttttaaaa ttatttttat cttttttata aaacagtaaa agtattaaat |
| 120841 | ttttttctac tgtttatatt gcaaatagac tttaaagttt ttaatctatt atttaccttt |
| 120901 | ctatatttat tttcttgagg cattcagaaa ttcttccagt catgctatta aatgcattca |
| 120961 | ttttaaatgt actctgcctt taatatcatg tttaaacatg tcttcccaac tttcaagatt |
| 121021 | acaaaacaat tcttggtatt ttctctgttt gattgtttac tttttcaatt ctatatttaa |
| 121081 | tcctcttatt tactttggaa gaagaagtat gttacacatt tgtcttattt caaattgcaa |
| 121141 | tattgttgtt acaatactaa ttattgcagg gttaattttt cttcacatat ttaagatgga |
| 121201 | aaaatctatc tcacacaata tatttgtaaa caaaaaaaga tatttataaa ctctataatt |
| 121261 | tttttgttgc actggagttt cctcattctt tcatgatgtt attctatgcc actctttaaa |
| 121321 | gagaagtgtt ggaggacatg aaaggtgaga ggatagacat gtaactattt gttggacacc |
| 121381 | taacttagga tggacagatt atattatttt tatcagcaaa tgtgaactca tcagtctttt |
| 121441 | ccttaatgac atgtgcttcc tcaaattaaa ggcagtagag tcttattttg attttcttgt |
| 121501 | aaaagtttta aagaattgtt ttcaaatcta aagtgatagt acatctaatg tagtttttct |
| 121561 | gtttgttgtg agttagaaat acaattttgt cccaatatta aatgacagag gtctcaatat |
| 121621 | cattagttga acagtctacg tttttttttt gttgatttct aatgccaaat ctatcacgta |
| 121681 | cggaggttcc tatgtgataa gaataaacaa tctggtctca ccagacctgt ctttagtttg |
| 121741 | atctgctgac ctattactta ttatatacat tttatttctg tgtcacaacc ttcattgttt |
| 121801 | tgattttttt aataattttt ttgagacacg gtcttgctct gtctcaaaaa atattaaaaa |
| 121861 | aattttttta atcttttttt tttttttcct gacagagtct tgctctgtag cccaggctgg |
| 121921 | agtggctcaa ttaaggctca cttcagcctt gacctcctgg gctcaaacaa tcctcctgtt |
| 121981 | tgattctctg tgtagctaag actacagttg ccactatacc cagctacttt tttgatgctt |
| 122041 | ttagagacaa ggtctcactg tgttgctcaa gtgggtcttg aatgccttaa ctcaagtgat |
| 122101 | cttcccatct cagcctccca acatgctggg attacaagta tgagccacta aataaataat |
| 122161 | ttaaataagt cttgctatct actggatacc cctaccttaa ttttcttttt caagaattgt |
| 122221 | ctgaattatt tttgaatact taattcatgt gtaatttagg actgttttgt caatttgaaa |
| 122281 | ataaatttct ttaagattct ggttagaatt atattgaata tgtgaattaa tttgagcata |
| 122341 | atcaatgtct ttgaaaatta atttttgcat atctatatag ttcaaatcct tcactaaagt |
| 122401 | attatagtta tgtaatttca caatatataa catcatgaaa cacttttctg agacttagtc |
| 122461 | ataatcaaaa tatagttctt atttgtaata agaaagggaa tttttttaat tccacatttt |
| 122521 | aatggaccag tgctggtgaa taggtgtaat tttagcccat atatattgat attgtactca |
| 122581 | gcaagcttat caaatttgtg ttatttcaaa agttttcctg ttgattttta aattatctag |
| 122641 | gtggaattac tactattagt atataatttc tttaaatttc catccaaatt tctatgtaac |
| 122701 | aatatttttg tcaaagtgta ttagttaaat gacctaacga aattgtcaat aaacaagtat |
| 122761 | ctttgtctta atcttgatta aatgaaaagc tctatgttac actaataact atgcttctgt |
| 122821 | atttgtttag tagacataca agttattaaa tgttgcttct atttaaactt ggtttgggta |
| 122881 | tttatcttga ttaggagtta aattagatta aacatttttg caacatctgt tgagataatt |
| 122941 | ttatgtaaat taaaattatt tactttctag ttttaaatta tcttcaaatt cttagaatga |
| 123001 | atcttttcat ttgtaatata ttttaagtat atattatgag actaatttac ttttacactt |
| 123061 | ttttttagca gttttgtgcc tgtatctaat tgcctacctt ctcattattt gctgtcctct |
| 123121 | actgttttta ctcactttga gaataatttt ttaacttctt aaaataaatg agaataaaac |
| 123181 | atttaggttc actgaagtag tttggagaag gtaaaaatta tgacattttt aaacttagta |
| 123241 | aaagtttttt ataaatccat ctgaatttga tatcttgtgt atattttgat agtccattca |
| 123301 | aaatctttga aattgttgat ttattaaagt tttttactac taatataaat ttttgttaac |
| 123361 | ctatgctttt taaaaacttg gcaatttcaa ctgagttttt aaattttgga ataaaattat |
| 123421 | ttagaacttt gattatataa agctctgcta tttagtattt tctacatttc atcaattttt |
| 123481 | ctgcttctcg tatttcttga tcagtaccat cagacttttg aatttcctaa tctttaaaag |
| 123541 | attttggttg tactaccatt gtctattata ttttgatttt ctatttattt attcattcat |
| 123601 | ttatttattt actactttga ttttggttga catccaaaag cataattact gcccttcaga |
| 123661 | caaattctaa cttttccttt tgctgagtct atgacttggg aaatttactt aaccttgcta |
| 123721 | tcccttggat ttttgtttgt ttagtttttg agacaaggtc tcacgctgtc acccggggct |
| 123781 | ggagtgcagt ggtgcgatct tggctcactg tagttttgac ctcgcaggct caagtgatcc |
| 123841 | ttccacctca gcctccctag tagctgggac tacaaaggtg caccaccata cccggctaat |
| 123901 | ttttgtattg tttgtagagg gcagtggggt ctcaccatat tgcccaggct tgtctcgaac |
| 123961 | tcctgaactc aagcatccac ctgtcttgac ctcccaatgt tcggggatta caggcaggtg |
| 124021 | ccacagcacc ctgtcatgcc tctgattctt taaaaaccaa agggaatgag actgttttta |
| 124081 | ggaataaata taaaataaat agcacaccta aaccacctag aacagtacca tgtactaagt |
| 124141 | aagcgcaagg tacatattag ctccttctta acttattcac ccttctttaa atttttctgt |
| 124201 | tgttcatttt tcttaactga aggtgaatat gtgcctcatt catctggaaa acttttttat |
| 124261 | aaaacatgta ctaatggata tggattctta gctttagccg gttttttcat tttgattgtg |
| 124321 | aaaagctttt tcgttgctga gttctaaaca tttatctttt atgtagaaat gttcatcttt |
| 124381 | ttctcagtta tagagaatag ttcaattttc aaactttttt gattgattta acattttact |
| 124441 | actttacatt ctacgtaata cttattccat ggaatctgtt ctttgttata gtgtacatgg |
| 124501 | tttaggtgtg taaatgtttc atgtgtattt gaatgtttgt gtccagattt ctgtcaagta |
| 124561 | cagatttcta cataaaagta ttgaattaat ttttgctaat tgcattctta aaatattcca |
| 124621 | tatcattctt tcttctgctt gatatggcag tttattaagt gtgtcttaca ttcttattat |
| 124681 | ttgtggattc ttcagtttct gtttgtgagg cttctgcttt atctatttac gtaatgcatt |
| 124741 | gttaggtatg tccaaattca tgattattgc atcttttcca tgaatttttt ctttttcttt |
| 124801 | tttttgagac ggagtctcgc tctgtcgccc aggccggact gcggactgca gtggcgcaat |
| 124861 | ctcggctcac tgcaagctcc gcttcccggg ttcacgccat tctcctgcct cagcctcccg |
| 124921 | agtagctggg actacaggcg cccgccaccg cgcccggcta attttttgta tttttagtag |
| 124981 | aaacggggtt tcaccttgtt agccaggatg gtctcgatct cctgacctca tgatccaccc |
| 125041 | gcctcggcct cccaaagtgc tgggattaca ggcgtgagcc accgcgcccg gccctttttt |
| 125101 | ttttttttga gacagagttt tgctcttgtt gcccaggctg gagttcaatg gtgtgatctt |
| 125161 | ggctcagtgc cacctctgcc tcccaggttc aagtaattct ccttcctcag tctcctgagt |
| 125221 | agctgggatt acaggcacac gccaccatgc acagctaatt tttttgtatt tttagtagag |
| 125281 | atgggggttt caccacattg gccaggctgg tcttgaactc ctgacctcag gtgatctgcc |
| 125341 | cgccttggcc tcccaaagtg ctggaattac aggcgtgagc caacatgccc agccttcgat |
| 125401 | gaattgtttt attcttacta ctctgtaatc acctgtcttt aactgttact gttgtttact |
| 125461 | ttaaatgtta tgtgattatt agttataatt cagttaaata tgacaaatat aaacaagcaa |
| 125521 | ttgaatatat gcatgtggaa gagcatctat ctttcacata actaaaaaat acataggaaa |
| 125581 | gtttttgtgg cacaaattgt ccaagggaat agtgtgattc tatcaccaac aaatgatagg |
| 125641 | ataatagaca ttaggcataa gtagcagtta ctgtgctcat tagttagtgg tagattctac |
| 125701 | ccatttattt tctgtcactg tggttttctg ctttaggtat gcctcttgaa agcagaacat |
| 125761 | agtcgtgttt tgttttctta tttattctct gtcttttgat agatcaagca aatttattta |
| 125821 | aattcatgaa catttctgat aacattgaac ttgcttttac tgtcttatta aaattttgct |
| 125881 | agttatcact ctcttttcac tctttttttg ctttgagatt aaagtgataa gttcttttta |
| 125941 | ttcatttctc catctgtttt tttttttttt tttttttttg agacggagtc tcgctctgtc |
| 126001 | gcccaggctg gagtgcgatc tcagctcacg gcaagctccg cctcctgggt tcacgccatt |
| 126061 | ctcctgcctc agcctcccga gtagctggga ctacaggcgc ctgccaccac gcccagctaa |
| 126121 | ttttttgtat ttttaataga gacggggttt caccgtgtta gccaggatgg tctccatctc |
| 126181 | ctgacctcat gatccacccg cctcggcctc ccaaagtgct gggattacag gcgtgagaca |
| 126241 | cggagcccag cctcatttct ccatctattc taagtttcta tttttatata acaaatcatt |
| 126301 | ccccaaattg caggcttaaa acagcagttt attacttttt tcctcacgat tctgtgaatt |
| 126361 | gcctggactt agtggatagt ctctcattgt ggtatttcat gtagttgcca tcagataagg |
| 126421 | gatgggacca cagtcatctg aaggctcaaa tgggatgaac atctacaatg atccaactca |
| 126481 | atggctgaca tagggaggat tccctctttt tctactgatt ggaatagttt cagaaggaat |
| 126541 | ggtaccagct cctccttgta actctggtag aattcggctg tgattccgtc tggtcctgga |
| 126601 | ctttttttgg ttggtaggct attaattatt gcctcaattt cagagcctgt tagtggtata |
| 126661 | ctcagggatt caaattcttc ctggtttagt cttgggaggg tgtatgtgtc gaggaatgta |
| 126721 | tccatttctt ctagattttc tagtttattt gcatagaggt gtttatagtt ttctctgatg |
| 126781 | gtagtttgta tttctgtgga atcagtggtg atatcccctt tatcattttt tggggggtct |
| 126841 | atttgatttt tctctctttt cttctttatt agtcttgcta ctggtctatc aattttgttg |
| 126901 | atcttttcaa aaaaaccaac tcctggattc atggatttct tgaagggtgt tttgtgtctc |
| 126961 | tatctccttc aattctgctc tgatcttagt tgtttcttgc tgtctgctag cttttgaatg |
| 127021 | tgttggagag cagtttctca taaaagcttg tggattcaac tgtaaaagtg gcaatccact |
| 127081 | ctgactcccc tctccactgc agagagcttt cttctttcac ttattaaact tttgctccaa |
| 127141 | cctcaccctt ttgtgtccac actccttaat tttcttggtc atgagaccat gagctcagat |
| 127201 | aacaccttag taataatatc aatgacccgg acctgttttg gtaacaccag ctctggggcc |
| 127261 | aggacacagg ggcactctca ggcagaagac tgaaatctgt gcaagtggta tacaaattta |
| 127321 | tcccttcata cacaaatctc aggccagtct ctctcttgga cttctaaaat tttacattca |
| 127381 | ttgtgatgag aatcaacatt tttggttcat ttcaaaggac aggctcaagt tttgccaatg |
| 127441 | ctaatatggc tcagcagaaa aatgcatgtg gcttgtatta agaaagcaca taaaggatct |
| 127501 | acattgactg ggttttcata atcacaaaaa acgaataaat ttgtatgagt atctttatat |
| 127561 | gaaggcaagg aggaaaacag gtgaatggaa gcctacgtaa atgtgcttat gatttaaaac |
| 127621 | aaacttattt cctcaggaaa aatatatttt tcacctcacc tgttaaagtc ttaggaaagc |
| 127681 | ttaaccttga taatctccta ataacagaac ttatgtttct tttctgaacc tcattccttc |
| 127741 | tcatattgta ataatgaaat gaataaatga atagcaagtg agtagtggtg cacactaaac |
| 127801 | tctgagtact gactgccttc tattccactt aataccttta taagaacatt gttatgtacc |
| 127861 | taagtcatgt catctataaa actaaggtaa tgataacaat catatgtccc taatataatg |
| 127921 | gttttgatga ttaagtggaa catagtaaat gtttaaaaat gttttctatt ataaccaatt |
| 127981 | tggctaggat aggtggaaag aatagaaata tgataattaa ttgtgaaatg tataatatat |
| 128041 | attaataggt catcaacatc aaattaaaaa atatagatga ttaccatgat agtgaaacca |
| 128101 | aagtttttag acaagtcaaa gcaaagttga agtctcagag accattgtgt ttatttgcta |
| 128161 | actgtattat cagactgctt agttgataca gtgaatacaa taattcttcc aatgtacata |
| 128221 | aactgccaga caagcaactc aatgcaattc actcactctc ggagaagttt atcccctctg |
| 128281 | ccaatgttca tctttcctgg caaaccatcc ttcagtattc caggcaaact agagcaaggt |
| 128341 | gaagttgaag aagatcctac tttatattcc attcagagag cttccgggtc ttcaaaaaag |
| 128401 | atttagtcat gtgggtgtga aagagctgag tcatgaaatt tggaccttat tgtaagtcca |
| 128461 | gaaggaaaaa caaggggttt gaagcacaag ggtgatatga tctaatttct acttttaaat |
| 128521 | gatcactctg attgtcgtga gggaactgat atgggatgta ctgggggaag aatgttacca |
| 128581 | ggaccaggtc gaggctgtta aagacctcca ggagagagca ttgtgggccg aacaacaagc |
| 128641 | ttctagtaaa gatcatgcaa gtggacacat ttgagatgta ttttgaaggt ggaagaaatt |
| 128701 | agataagcta atgggtagtg cctggaggga gtgaggattt ttgaaccact aggtaaacac |
| 128761 | ctgtgagtaa cagagaaaaa gttgggatgt gttatgaaag atgaatccta aaatttcata |
| 128821 | tgttgaagac tgatgcttca ggacctcaga atgtgaacat ccatagtaga agggaattgt |
| 128881 | gttgttgacg gctgccaccc actctaggtg cccaagctcc tgcagcagtc ctacttctcc |
| 128941 | ctttcaccca cactcactcc cagacagtgt ccctttcagc tcttccatca ccccttcttt |
| 129001 | tgatttggct ggtgagagca tagctggtat ttatactttc ttgatatgct agtctctttt |
| 129061 | gctgattgtt gacattggag aaggtcatgg aagggacctg agctgagcga cctttaggag |
| 129121 | catttcctgt tcttttcctg tactctgctg ccaaggagaa atctgtcttt caccaggctt |
| 129181 | gcagctttct ccgttaccca catcatcagg caatatctgt ctggcacccc tctttgttcc |
| 129241 | ctttctctgg ccttcctttt tgacatgatg gttgacctga aatcaccaag gcaggactgc |
| 129301 | tcatctccag gtctaatgga aaacagtatc tggtgaaacc aaagaaaata atcccagtaa |
| 129361 | cccactggga gctgcttggc ttaagcacct accctgtgcc taagatacaa cccatcaagc |
| 129421 | ccagctaaaa ctgatccagt ttccacaggg ccagagaaga attgccaatt aagaatgcat |
| 129481 | tcccacttca aatatgtcta tatttatttc agggaaaata tcagtctgcc tgggtccctt |
| 129541 | atgagaacat tgttgtctgt agaaaaatct aatctattag gaagccttct tgttttgtta |
| 129601 | tctgcaactc ttcagaaggg ccagaccaga ccctcgtatg cacagtacag gatccaccca |
| 129661 | tgcacatctg tctagggcct tgtctttatg attttctgtc acatggcctc tcagccatgc |
| 129721 | ctccaaccaa gctatcctca aataaacact agccgtgcac aaaaagtgaa aaattacaca |
| 129781 | aggcctacac aaggtctgaa atggaaagtg cagctggtga taccgagtag tatattttat |
| 129841 | gaattgagga acagggaatt tctaggtatc acagagcaat cagcagctga gaagaggagt |
| 129901 | accaatccag gaccctggaa ggatttttca gaaacttaat agtttattgt ccaattgtag |
| 129961 | agacaaaaat gaaaataaag atagtgagga gtaccataca ccattgctta gaagattaaa |
| 130021 | taaatgtcat ctcccacaag tcatgtgggg agaaaaaaac tatataggaa gaaaattaca |
| 130081 | aacgacaagg tagtctcagc atataaaata tcaacaaatg aatgtaagaa agagaatgag |
| 130141 | aaagaattag tattagaata tcatagaaaa aatcatcttt gtgaaagaaa actctgatga |
| 130201 | aactggtgac ataaatactg agtaaaaaac agaagaccaa tcaaggcatt tgaggcttga |
| 130261 | acaggcatta caaatcatca agttgaatat ataagtatgg ccacttagtt attagtggtg |
| 130321 | aagactacgg tatttgttag aagaaataaa gtagatgatg aattctatag aatattctgg |
| 130381 | agaaagtgga ggtcttagct acatgacatc gtgtggctca ctttgggaac catgtttcag |
| 130441 | tttgtttagg tctagaaatt ccttggtggt ttctgtgttc agttttgctt taataatccc |
| 130501 | taaagatatt ttttaaaata caaatttttt agctttcctg tattgtacag caccaacgct |
| 130561 | tgcctgagtg tagtgagatt cacagagttt ggaaatttcc tgtagcatga ggaggctgcg |
| 130621 | gggcagcctt ctgtcatcta tgtgtaccca gcagtgtgct gtcctcacac aactcacgga |
| 130681 | taagcagaaa gcatctctat tacatgaaaa atttagctaa atatacaaat atccatgcac |
| 130741 | acacatcatg agagatggaa ataggctatc aaaagagtca gacatattga ccgtcttcac |
| 130801 | tgttagctgt aggattgctg cccaaccccc tgacacaccc acacaaactc acatacacaS |
| 130861 | aaatgaaaag cacagtggaa agcagaatag cagtctttcc aaacagattg aaaaacaaat |
| 130921 | gatgtctaaa gttcaatcct gacactgtgc tgattgcttg gacacagttc cgtcaaaaca |
| 130981 | tttgtccaag tcatagttgt accttttaga aattagccac aaacaacatc ctccccaacc |
| 131041 | cttcctgcta ggctagagtc ccagaagaaa tgagggatac acttgacctg aagtaagcaa |
| 131101 | agcagaaccc agtctctgag gcgaggaggc ccacctggta gggagctcaa atgcgccatt |
| 131161 | gtcctgcttg tctttataaa gggagctgac acgtttctcc cagcataaag ttgggagtga |
| 131221 | caccagagcc ttctgcaaga tgcttctgat tctgctgtca gtggccctgc tggccttcag |
| 131281 | ctcagctcag gacttagatg aaggtaagcc gaattggggg aagatattgt gactctgatt |
| 131341 | ggggtttacg ggcgaatgct atagaggggg aaagtggagg gaagagagga ggatgagaaa |
| 131401 | acagatagga ctgaagagtt ctcatgccaa ggatcagaag acctgttgtg ccttcattcc |
| 131461 | tcatcaagac ctcataattt attgattgca caaatagaac ccaataaaga atttgtaccg |
| 131521 | ggggagtgag agagtgagat ttgcatttat agagacatgg gactgctggg aaggatatgg |
| 131581 | agaatgcaag acagattcag ggaagtgcag ctgtgaagat cctatactga tcccagtaga |
| 131641 | cagggatgat ggtggccttg ctggacagtg gatgagtatc catgaaggag ataaacacat |
| 131701 | gtcagagcta ttgctgaggc agagaattgg gtaaacactt gcctctgtct acatagagtt |
| 131761 | agagaatcac cagagtgaaa tattgtcatt tttttctctc ctgcatgtag tattttaatg |
| 131821 | tgctgggacg ggcatttgta agattgtatc taagtggcta tgtctggtgg ctcctgttga |
| 131881 | gaaagcttgc aaacataaac aacatattta cagatgaaag agggcagaag gatccccaaa |
| 131941 | tatttcattg aaatactcaa gagcccttta actaaataag cactaaggct taaggaatca |
| 132001 | tgagaggaca aacaggggcc cttctatgtt gagttcctgg ttgacgctca gtgtagtaac |
| 132061 | aatcctgctt tcccttacat cttcttccac ttccggtagc atcagagagt ggctgatgag |
| 132121 | atctcaaagg ggatgcacag ggtgtgatca gaggtccttt atcctcgtag aacactatga |
| 132181 | gctctgaatg attcatgcag taacttttcc catcatcctg tacttctttt ctagatgtca |
| 132241 | gccaagaaga cgttcccttg gtaatatcag gtaaatccca ataaattctc agtaaactct |
| 132301 | gtctccattt ttccctgaaa aattgatcag ttctccagtg tcttcttatc atccttgtca |
| 132361 | ggaattggct aatatcagtg ccccagagat ataaacagtt ttctcccaac cttgattctg |
| 132421 | gggaccatga gtaaagaaat ttgatttttc accaccctaa tgtggattaa gaggagttct |
| 132481 | aattaggaag ccttgggaag gggggaggtt gggagttgag aggcaggtca gggagagagg |
| 132541 | ggccggccgt gtggtgaaga cagagagata tgaagacagg agggttttcc agcatgagct |
| 132601 | cagctcttct tgtttcaact cacacagatg gaggagactc tgagcagttc atagatgagg |
| 132661 | agcgtcaggg accacctttg ggaggacagc aatctcaacc ctctgctggt gatgggaacc |
| 132721 | agaatgatgg ccctcagcag ggaccacccc aacaaggagg ccagcagcaa caaggtccac |
| 132781 | cacctcctca gggaaagcca caaggaccac cccaRcaggg aggccatccc cctcctcctc |
| 132841 | aaggaaggcc acaaggacca ccccaacagg gaggccatcc ccgtcctcct cgaggaaggc |
| 132901 | cacaaggacc accccaacag ggaggccatc agcaaggtcc tcccccacct cctcctggaa |
| 132961 | agccccaggg accacctccc caagggggcc gcccacaagg acctccacag gggcagtctc |
| 133021 | ctcagtaatc taggattcaa tgataggtat gattccagtt tattatccat caaaggctcc |
| 133081 | aactgctaca gttctccaac ttcattgtgc cagtgaatct attgaaaagc tgttaatatt |
| 133141 | tccgtgtcct ggaacacatt tctcatgagt tttgttcaaa tattctggga taaggtagca |
| 133201 | agatcttgtt tttaaacaat ctcttgaagg caattccaat tttgagaatc actatcttca |
| 133261 | aattacctct cttaaatagg gttgggaatg aggacataga atcatgttct ccctttggca |
| 133321 | ctctgtttcc tttcctcaaa ctcaaagact cccatttatt taaagtttta cctgaacact |
| 133381 | ccttgttcag gacaggctca gtcctgcctc acactagcat ttcaagtcca gtattcctgc |
| 133441 | taaatggtcc ttggactttt agctgttaaa tggtatctca ttttttaaaa cacatttcac |
| 133501 | atttaaagtc atacatgctt aagctaacaa aaactaatct cactgaatag acatgtacca |
| 133561 | agctaaatag caattcattt ctcctcccct ctacccttac caaaactccc actttttact |
| 133621 | gtttggaaac tcctctttga aatatttatt gctacataac tatatataat tttcccacca |
| 133681 | ctaataccac actttatatt cagttctgtg tcttacttat tggaaaaatt tatttcttag |
| 133741 | ctttcacatg agtttattta gatctcttca gtgtttaYtg gttagttttt ttttttacaa |
| 133801 | ttatatatga tgctattgtt tggtttttcc ataatttact taaccaatcc ttgtcactga |
| 133861 | acattaaggc tgctttcaca ctgtccctat tacaggatat gttgcagtcc ccatctttct |
| 133921 | gaaaataacc cttaacgtat ccaacagcca caaagcatga acaacctaac aataatcgtt |
| 133981 | tttcgtcctc atctaagcaa |

[0315] Following is a genomic nucleotide sequence of a GRID2 region (SEQ ID NO: 3).

| >4:94744101-94841750 | |
|---|---|
| 1 | tcaactcctg ggctcaagca atcctcccac ctaagactct aaaataactg ggactaccac |
| 61 | ccagtcaaat gccaccacat ttgactaatt tttataaatg ttttgtagag atagggtttt |
| 121 | gatatgttgc ccaaactagt cttgaatttg gggcctcgag tgatcctccc acctcaacct |
| 181 | cccaaagcca tgggattcca ggtgtRagcc actgtaccta accctcttct ggaaaatctt |
| 241 | aaRgccttag attgcattcc tgtctttata ggtcatattt ctcattattc tcttcttttt |
| 301 | gaccttttct ttgcaacttg agagttttaa aagttcactt attgtgtaac ttattcatta |
| 361 | gtcctgatat atcatttgca ttctttacta ctcccaactg ttatttttat tctgcagtag |
| 421 | aagtttgtct ttattctttt ttgttttctt ttctcatatt atctcatctt ttatatcatt |
| 481 | accttccttt cagcctattc tctttgttgg ttctctactg atgtttcacc tagattttca |
| 541 | ttgtttaaag gcattcatca gattatattg caacattttt attgaatgca gccagaattt |
| 601 | atgtgaggta tgtactacct ctgagacttg agggtgatat tctgatttgt ttagggtgca |
| 661 | atgagttttt gtgtttgttt atgtttctat aaaccatcca ggcccaatct ttatttttgt |
| 721 | caatagttaa agaaagtgaa gcatcttttg cctcctctac aatccattta gttaagttca |
| 781 | gtttttcttt ctcagaccta gagttaaaga tcaaatagat atgttcagca tttaatcaaa |
| 841 | tttaccatgc atagtaggta ttccatgtat aggtttttga cagagattta ctaaagttat |
| 901 | ttggtctaat tatgacagag catttattcc agacactgtc ttgtttatac tacttatcac |
| 961 | tcagtgacta aatcttccaa aacaaaaatt attgtcatct caccctctct acttccataa |
| 1021 | ccttacggtg gtttctgctt tgagtagtag tctctggata tttgtgaaag agtgtaactg |
| 1081 | agaaggcagc aggtagtgaa taagagaaca aagtctctgg atactaataa agatagttct |
| 1141 | catatagttc aggatagctt gctgcttact tggccataaa gctcttacag cctaaagtta |
| 1201 | ggcataatca aaggaaatat tgttgcggga agtcagggac cccaaatgga gggactggct |
| 1261 | gaagccatgg cagaagaaca tggattgtga agatttcatg gacatttatt agttccccaa |
| 1321 | attaatactt ttataatttc ttatgcctgt ctttactgca atctctaaac ataaattgta |
| 1381 | aagatttcat ggacactaac cacttcccca atcaataccc ttgtgatttc ctatgcctgt |
| 1441 | ctttacttta atctcttaat cctgtcagct gaggaggatg tatattgcct caggaccctg |
| 1501 | taataattgc attaactgca caaactgtac agcatgtgtg tttgagcaat atgaaatgtg |
| 1561 | ggcaccttaa aaaaagaaca ggataacagc aattgttcag ggaataagag agataacctt |
| 1621 | aaactctgac tgcctgtgag ccgggtggaa cagagccata tttctcttct ttgaaaagca |
| 1681 | aatgggagaa ataatgctga attctttttc tcagcatgga acatccctga gaaagagaat |
| 1741 | gcgcacctgg ggataggtct ctaaactggc acccctgggc atggtcatct cttatggtcg |
| 1801 | agactgcaga ggtgagatag actccagtct cctatagcac tcccaggctt attaggaaga |
| 1861 | ggaaattccc gcctaataaa ttttggtcac actggttgat ctctcaaaac cctgtctcct |
| 1921 | gataagatgt tgtcaatgac aatggtgcct gaaacttcat tagcaatttt aatttcacct |
| 1981 | gggtcctgtg gtcttgtgat cttgccctgc ctccgcttgc cttgtgatag tctattacct |
| 2041 | tgtaaagtac ttgatgtctc tgacccacac ctattcacac actccctccc cttttgaaaa |
| 2101 | tccctaataa aaacttactg gtttttgtgg cttgtggggc atcatagaac ctaccgacat |
| 2161 | gtgatgtcta ccccggacgc ccggctttaa aatttctctc ttttgtactc tgtcccttta |
| 2221 | tttctcaagc tggccgacgc ttaaggaaaa tagaaaagaa cctacatgaa tatcggggca |
| 2281 | attccccgat aaaatatatt atatagggag actcaaagca tatttctacc ttccctgtac |
| 2341 | taatttgaaa aagaatatat atggttgata aatatatata tatatttaga ataagtatta |
| 2401 | agccccaatg ttatgcatac tcaaaggaat tatacaacat aaagagaatc aaagtatatt |
| 2461 | tctactYtcc ttggactaat tcgtcctgtt ctggttgtaa gtatgggata tgaaatacat |
| 2521 | agatgaaatg tatgcttttg aatctatccc caatctcaat ttagttgttt caaattattt |
| 2581 | gagaatttct catttatctt tctctaactt gaattatgga gcctgtggct ttattttttt |
| 2641 | ttttttaagt tttttttttt ttggtcagtt gttgaaattt ttaaacagat atttggagga |
| 2701 | ggtgtatcag agccagctag ttttaagtct cagactggtc actcttaaaa taatcccacc |
| 2761 | cagtcatgcc atcatcaaat ttagttgcct ctctccttgg cttaaattta atacattttt |
| 2821 | tccccaatct attggactct ttagaaatgt tttaaacaaa aatgactaat ttatttttta |
| 2881 | aatgtaatta attttgttga ttgaataaga atgtttaaaa atgaaacatt attgtgaaaa |
| 2941 | ttaccacatc cttggtttaa aatagcctga gaaaggaaag cacagccata agaaataaat |
| 3001 | atacgaatag gttaatacag aggaaattgt gccagacaaa gctggttgct tttttgatag |
| 3061 | ctttacagcc ttagtaaatg aacagagtgg agtagacata atgcatcttg acttctagca |
| 3121 | aagtactgga gacaatgtcg tgtgaaattt tgattgcaaa attaatttga gttggcttga |
| 3181 | aaaacactgt taaaggaaat ataagctggt tgaaaagaca tacagagaag agtgttgatt |
| 3241 | aatgtcagtg aactaatgag ttgagtgata tctccagtta aatgtcacga ttgtgagtgt |
| 3301 | tggattgaat tatttttgtt atctgttgaa aaaataaata acatagggtt gattaaatta |
| 3361 | gagcagaaaa tttatcagga gacaccagtg attacagaaa atctatataa agacatgaat |
| 3421 | tcatttcaga gaaaaaccag tgaaacaata taattttact taaagagtcc atttttttaa |
| 3481 | tcacaaaatg gaattctatg aagtatcaat gcttaaagac cttcaaacta cagaatttct |
| 3541 | caaaactaaY tggaaaacaa aattaactat ctcagtaagg ctagaacatc attttaatcc |
| 3601 | agttagtagc tacattttat cccaaccaat aaagtgacag ttaattctta cctagaggat |
| 3661 | gtggttaaat gtataattat tatttaccag aaataaaaaa agtatctaga aaatcagtaa |
| 3721 | cctctagaaa ctcttgggca caggagaggg agaaaactat ggaaggggaa gtaattatgt |
| 3781 | tcttaactat gttacattct taagttacat tcttaactat ggggatatag taagactcta |
| 3841 | aataactaaa gttttttttt attatacttt aagttttagg gtacatgtgc acaacatgca |
| 3901 | ggtttgttac atatgtatac atgtgctatg ttggtgtact gcacccatta actcatcatt |
| 3961 | tacattagat atatgtccta atgctatctc tccccactcc cacctctccc cacaacaggc |
| 4021 | cccggtgtgt gatgttcccc ttcctgtgtc catgttattt ttgaaatatc cagattaaat |
| 4081 | gtagttaagt aaaacaataa actttttcaa tgtaggtttt ttaatgctaa tgaaaagcta |
| 4141 | gtcagcatgg ggtaaattag attaaattag attaggtaaa ttggaataag aatcaaatga |
| 4201 | tcacaatcat aaaatgggat tagtcttact ataagtcaca cctgcaaaag gaagaagata |
| 4261 | acctggaaaa atttaaagag tcttccactt tacgaagtcg tagtgagttg gcaagtttta |
| 4321 | ataatttaaa agaaaacgtt gatttcatct aaaaagagag agagaaagtt ttagttattg |
| 4381 | attcaacatg tatttattga ataacttaaa tgtgcactat ttttggtttt gtgagcagtc |
| 4441 | ccaaacgatt aaaacagagt gacttgttcc ctgactatct taaattatcg caaactgatt |
| 4501 | ggcttaaaac aacggaaatt tattctctca cagttttgga ggccaaaagt tcacaagcaa |
| 4561 | ggtatcagca gggctgcact ccccctaaag gctttggggg agaatgattt tgagcgtttc |
| 4621 | agcttctgtt agctgtcagc attctttgat ttgtggcaac atcactccaa tctctgcctc |
| 4681 | catggccatg ttgcctcctc ttctgtctga caaatctccc tctaccatag tcttaaacaa |
| 4741 | acagttgtca ttgggtttag tgcatattca tgtaatctag aacactctcc cctctcaata |
| 4801 | cttaacataa ttatatctgc aaagatcctt tttccaaata aagcaacgtt tgtttccaaa |
| 4861 | ttttaggatt taatatctct gggtgaccat gatttaacct actacaaaag cattttctaa |
| 4921 | caagcagctt aaaataggtt tcttttttct ttgagacagg gtcttgctct gttgtcaagg |
| 4981 | ctggagtgca gtgSacagtc atggctcact gcagcatcac actcccagtt tcaagcgatc |
| 5041 | tttccacctc agcctcccaa gtagtttaga ggacaggtgc atgccaccac acacagctaa |
| 5101 | tatttcattt ttttgtagag acagggtctc tctgtgttga ccaggctggt ctaaaactcc |
| 5161 | tgagatMtag caatcctcct gccttggcct ccYaaactgc tgggattaca ggtataagcc |
| 5221 | actgtgccag gctcaaaatt aggtttctat tgctgcatta atatatacac agRgccatct |
| 5281 | ctttctcttc taattatttt acaaatataa agagcatctg taacacaatg aagctgtttt |
| 5341 | ccactttagg aaaagacagt tttgaaaatg tgattaatta tttgttgcag gttaggcttc |
| 5401 | atacagtcat attcccagtg cacattgtcc tcaagatctc cccagtttgg cactgaagcc |
| 5461 | ttattgactc tgtctctgaa agaggcctta aatgatcccc cttccttcta atcctcactg |
| 5521 | aaattccctt aggttaagcc caatttatcc aagggctatg gtcttctact tgatgttctg |
| 5581 | tttttaatcc ttgatgctat ccttctcctt ccatacaaac agtagataca catattttca |
| 5641 | aaacacagac tttcttgtgt tctctactta aaaatctgtc tagctttcag atacataaag |
| 5701 | gaaaagcaac ctggttttaa gagcatgcaa tgYttcttct taaatttccg atccctgtcc |
| 5761 | ttgtctgcag atttatcact taacattcct ctccttgctt cataatacta cacacacaga |
| 5821 | catacacaca cacaaacaca cacaaacaca cacacacaaa cacacacaaa cacgcacaca |
| 5881 | caggcacaca cacacacgca cacacaaaca cgcacacaga gacacacaca cacacgcaca |
| 5941 | cacacacaca cgcacacaca gttccttgat attgcagtca cacagaattg ttcactgttt |
| 6001 | cttgaaaata atcataaact gcatttgctc atgttatttt ttgagatcag agtgttcttc |
| 6061 | cctctttttt ctgctttaag gttttctctt tttttgcaca gctattaaaa cttggccaac |
| 6121 | tattatattt tctctatagt tttccctgat ccttacacat cttcatagct ccttacatgt |
| 6181 | aactctatta ctgtgtgcat catatgcgat cgtgtttatt ttccctgtgt gatttgtttt |
| 6241 | ttagactatg accaccttga agacagaact gggtcttatc tatctttaca tctcctagtt |
| 6301 | gtttgcatgg ttcttgacac atagcaaatg ctcataaact tctgatgaac taaattactg |
| 6361 | taaattaaag tcattgatac atttaaatgg cacgatttac ctatatctgt tttataatca |
| 6421 | tagttaacaa attaagcaaa atacttctag gaccaggaac tcaatatgga gacactccat |
| 6481 | tgtaagagag aaagatgcat tgaatcgttt attcagaaag aacttattat gtcactgtag |
| 6541 | gcactgcaca aaggctaaaa atcccaaaat agaattgtta aaaaattagg gtttaagatt |
| 6601 | aaaggcaaag gaaatcatat ttgttgagac tattagggtt gcttgaagta aactaatgcc |
| 6661 | aagtttaagt aaaaagattc ctgctatatg atataattgt taagcctaag agaccagcag |
| 6721 | gcaccaggta cagttacatt cagatgctca agcaatgcca ttagggaact gcccatgttt |
| 6781 | agccattact gtgttctgtt attccttttt tttttgtttt gttttccctc tcaggcagat |
| 6841 | tctactcatg tggtaacaag actattattc tagatactgt actcatattt aacagtctca |
| 6901 | gggaaagagt gaagcctttt actcaatcgt tccagaaaat atctaatgga tgaagggaag |
| 6961 | gctctaactg gccttcgttg gaccacttac atttctttga accaattact ctggtcagaa |
| 7021 | gatgaacatg tctgatcttt caggattaga ttcacatgca aaataatgtt acaattcaaa |
| 7081 | ctaggaaaaa taaattatat atttttaaga gactggatga aaatactcca tacatcacat |
| 7141 | gtgcttttct ttttctgtat attggtatat acataatcac tatttctttt tttttttttt |
| 7201 | tttttttttg gagatggagt cttgctgtgt tgcccaggct ggagcgcagt ggcatgatct |
| 7261 | tggctcactg caacttccgc ctccaaggtt caagtgattc ttctgcctca gcctcctgag |
| 7321 | tagctgggat tacaggcacc caccaccaca cccggctaat ttttgtattc ttagtagaga |
| 7381 | cggggtttta ccatgttggc caggctggtc tcaaactctt gacctcatga tctgccagcc |
| 7441 | tcggcctccc aaagtgctgg gattacaggc gtgagccact gcccctgacc caccactatt |
| 7501 | tcttttgtaa ttaaaaagta catatacact ttatattttg atgtagatgt aagaatagcc |
| 7561 | tctgcttcaa agacctcatt ataatagtat taaagacaca caagtaaaca aaggtaacaa |
| 7621 | taaaatagta atacatatca aatattaagt atctcaggaa taattattcc ttctaaggaa |
| 7681 | tggcaaagaa atttttcaca ccacaaagtt aattttgaat tgggtcttca aggaacataa |
| 7741 | caatttgaaa agacagagag gactttccag gaaaatgtaa ctacatatgc acaaatgaca |
| 7801 | gtagggatta tagtaaKWac acttttatta ttattctacc tcttcactct attcaatttc |
| 7861 | cctgactact acaatgtccc catgttggtt tctcctttct tgtattccaa gatattgtgt |
| 7921 | cctgcttttg cttattattc tctacccctt aagcttctca ttgcttcctc cttcttttct |
| 7981 | cttttttctg ggcctccctc tttgttttta cgatccctgg gaggactcat ttaattgact |
| 8041 | cctaaatggt ttctgtgtct ctagtgtctt gtagacatta gaggcacaga aaccattttt |
| 8101 | cactgtctat tttccactcg gcatccaaac taattttcca taaacattgc ttccatcatg |
| 8161 | gatatgtgct ttaatagcat tggaatcaga cagatcttaa gcacaataca atagtatata |
| 8221 | taccagatac cagttatatg actgtgagaa gatagtaact tctgagagtc tcactactaa |
| 8281 | tgcccaactt gtaagataat tatgaaaata tgtacaacat atgtatcact ctcagcagtg |
| 8341 | ctagccacta gatagatgtg caatatataa gtagataata cttttgtggg tatctatatt |
| 8401 | actcctttgc ccataaccaa cagtgaacca tcatgttcct ttttaagctt ggtggtggat |
| 8461 | acaggtgttc actttaaaag tctcagtctc agatttcaag tcttcaaccc atctcctaag |
| 8521 | ctgtcagagg cctttacaat ctttacctac ctcctttatt cagtcttatt tcctatcatt |
| 8581 | tccccacagg aactatttgc tggcccttta aKttctccct tacctcagaa cttgctaata |
| 8641 | tttatcactc ttaaatatat gtttttgctt gtgctgttcc tcaaactaga atttttctgc |
| 8701 | catcttttgt tatcctctct cttcttttag tttaaatacc ttctgttctc taagtttttt |
| 8761 | ttttccagga caacctagaa aaaaatatct ctttagtttc tacagtggca gaaggtaatg |
| 8821 | tgatttacca atttaattac ttcatattac aatatagtga ccatttatat cagtgtatag |
| 8881 | tacaaatatg tatactgtgg tcttactact gattatctta ttcttattta ttgcctctcc |
| 8941 | aacaagatgt tatcacccat agacaagaat catattttat atatctttat aacccaaagt |
| 9001 | gcctttttaa aattaatgta tcatgtttgt tttcctggaa caggaactga aatagagagt |
| 9061 | atgaattcat ttgtaactga atctttgctg taatagttat ccccagcatc cttgctaata |
| 9121 | cagagaatga agccttaata cctaaagcag ccactgtRtg tgattaatta acttctctcc |
| 9181 | tatgcatctt gacaggtagt ggctatgtgc cattcttggg agaactggga aaatggtcac |
| 9241 | tgaaatcatt tttgttgttt ctagttccaa tgagaaatgc cagcYgggaa aggctgctac |
| 9301 | agtatgtagc aaggtgcttt tgctgaaata ataaaagtat ttgcaaggaa atacttgaaa |
| 9361 | taagtgctaa atttccaaag attgatctac actacagaag gcttattagg gtatattgat |
| 9421 | actagtatgt gttgtcttaa gtggtacatt gtagtttcca tgccaattct tggtttaaaa |
| 9481 | cgcagcatgc atctgttata tgccactttc cacttaaatg cctaagacag gtagattgca |
| 9541 | ctgtcaagtt aggtcattat aactccaaca gatgttgtca tgtagatgaa gaaaattcat |
| 9601 | tttaaatgat atcatttata aaatgtgttt ttctttgtac ctaaaaaagg caataatatg |
| 9661 | tcatattagc tcttcagatt caggttgcaa tcagtatggc atgttttgat taaacacttc |
| 9721 | acaatttcaa aatcagtgca ggataatgat ggagcacatg tgaggaaaca gcaatagcag |
| 9781 | gggtgtttac agtatcccag ttgtttcaag cttaataaca cttcatgtta tcaatcagtt |
| 9841 | acaaaggaat aattggtgga taggctgagg aaatggtaca gtaagaaatt gtacttattc |
| 9901 | taaactatag ggatggaagt gcagccaggt caatacttat ttggttagta tattgtaact |
| 9961 | aatcatttga gttttgccag ctggtatctt atttttgctt atttgtttaa ccgcttttaa |
| 10021 | ataagtatat aattttaaca atttaagtca gttgaaatcc cccccataga gctctcctcc |
| 10061 | aaatgcatcc ctagctacat tcttctttct ggagattaac cagaaattgg tggtttcatc |
| 10141 | ctgtttatat gaatacattc ctagaagata aaatcatatt gtagatattt gtgacaaaat |
| 10201 | tttcctcaca actatatgaa agagaacgaa ggaaggtgtg tggttaggag ttagctgtca |
| 10261 | ttaaaagtgt gtaaattttg cacgttccct acatttattt tccagtaaat tttactagtt |
| 10321 | tctttctaat cagttgggac taaagtcaat cgacctgtct ctgcttcttt caatttcatt |
| 10381 | tcccaaaaga attttagtgc ttctctatta ttcttaactc tgccttgccc caatacatta |
| 10441 | atcaatgctt tgggtaacaa cattagattt gtacagggaa ggaccaggga atggcattcc |
| 10501 | aaagcaacac atggaaaggg caagagctga atttcataaa ccgtaaccta atccatcact |
| 10561 | gcagctttcc gttgcctcta cccagactgc agccaaacat actctaagct gccactttag |
| 10621 | agtatcttta ccctccatgg gagtttttct ttttttccct tttttttttt ttttttgagR |
| 10681 | cagaatctca ctctatcgcc caggctgaag tgcagtacag gatcttgtct cgctgcaagc |
| 10741 | tctgcctccc gggttcaagt gattctcctg cctcagcctc ccgagtagct gggattacag |
| 10801 | gcactcacca ccacgcccgg ctaatttttg tatttttagt agagatgggg tttcaccatg |
| 10861 | ttggccaggc tggtcttgaa ctcctgacct cataatctgc ccacttcatt ttcccaaagt |
| 10921 | gctgggatta caggtgtgag ccaccgcgcc tggccaggag tttttcactg tgatgttgtg |
| 10981 | taggtctctg gaatgtatgt ttccctctgc agtttcccca gtgttgattt taagggagga |
| 11041 | agccagagca cttgctattt caccatcaca cttgtttgaa gtgtgagtta ccatgcaatg |
| 11101 | tttaaaacat gagttacacc tttttggagg atgctgtaga ataccgattt attttttgtg |
| 11161 | tgaaaacaaa ctctacctca ggttaatcaa ataattactg aagaaaaggt ttttctttat |
| 11221 | tcaaatattt cagcacatga atgaagaaga aatggtaaaa gtaaaacatg aacatttggc |
| 11281 | catcactaat tatattagtt tgtagaggct actgtaacaa aattccacag accaagtggc |
| 11341 | tgaaacgaca aaaatttgac tgggagttca aaagcaaggt gccagtggat tgggttttcc |
| 11401 | ctgaggcctc tctcttcagc ttgcagatgg ccaacttttc cctgtgtcct aacatggtct |
| 11461 | tctttgcacc cgatggctct ctttatggtc taatctcctc ttcctgtaac tacaacagtc |
| 11521 | tgattagttt tgggcccacc catatgatct cacttaacca taattatctt ctttaaagac |
| 11581 | cctatcttca aatgcattgt gaggtactgg gggttagggc gtcaacacct aaatttgggg |
| 11641 | aaacacaatt cagctcatta aatgaatgga agtcatacct gaaatcaatg acggatcgta |
| 11701 | tgactacaaa aaaaggagac aaacattata cacctgctgt ttaaagtata caacacaaaa |
| 11761 | ttattgacaa atattaagct gaattaggtc aatcttctag atttaccaat ttgcaaataa |
| 11821 | tgcaatccac agagcaagat gtggatatgg gggattcaga cagcaYaatc tagctcggga |
| 11881 | aactacagaa aaaaaaaatg acccattttg tgacatataa ttgaaggaac aaatgaagat |
| 11941 | agatgaatgg agaacccRta aataaagcaa ttcaagatac acatgaactc ataaaacata |
| 12001 | ggtcctaatt tgagtaaaga aagaaaattt taatactgac tggWtatttg atgacactga |
| 12061 | gaaactattc taactgtgca gctatgaaaa ggaatgagat catgtccttt tcagggacgt |
| 12121 | ggatgaagct ggaagccatt atcctcagca aactaacaca gaaacagaaa accaaatgcc |
| 12181 | acatgttctc acttataagt gggagctgaa caacgagaac acatggacac agaaagggga |
| 12241 | acaacacaca ctggggcctt ccccggggbg gagtgcagag agggagagca ttaggaaaaa |
| 12301 | taactaatgc atactgggct taatacctgg gtgatgggtt gataagtgca gcaaaacacc |
| 12361 | tttgcacaca tttacctttg taacaaacct gcacatcctg cacatgtacc tgcacatgaa |
| 12421 | ctaaaaataa aaataaatta ttctaaatct tgggaagtat gataatggtg tcatgattat |
| 12481 | gttttaaagg acttcttaac ttttagagat atataccaga atagaaataa tattgtataa |
| 12541 | tgtctgccat ttgtttcaaa tcaaatctga ccaaagtagg ggcaagaaag agtaggcgca |
| 12601 | taaataaata actcattgat aatgagttga taattgtttc agtaggatga tgaatatttg |
| 12661 | agtttataat tttattctat ttatatattt gaaaattttt atactgaaaa gttgaaaaag |
| 12721 | ctttatattg gtattttaaa ctttgtaaat gtKcactaaa agaagatatg tctttttagt |
| 12781 | tgttttgcct gagttatgat gagctttgat gagtcaatca ggctgcctct tgagttttcc |
| 12841 | ttgtaaggtt aattgggtgc actggagagc tagctgaggt taggagagca ggctctggtt |
| 12901 | gaaggacagg gtttcggctt ggcagactaa ctaccttctc tgattattaa actttgatgc |
| 12961 | cacccacatt agcacagtat tctagtcacc tgtgataacc tgtccagaag ttgctctgat |
| 13021 | cgtgttcagc tcaataagtt tagacttcac acaatagtgc ttgtcatttt ttaccctctt |
| 13081 | gtaccaaata tatttcaaaa tatgtccaat ccagctgtta atttgactga ataaaatatt |
| 13141 | ataataacac ttctgaggat tgagatgatg tttgaagttt ttcaagagtc ttttccctct |
| 13201 | ggattagaga acatctctgc cagaatcaaa atgagtctca aaattgacag tttttacttt |
| 13261 | acttgctaca gtaacctggc attttaaaaa gcattctgga aaaaaaaaat gaatcttctg |
| 13321 | attgtgtaat aaaagaataa gaatagaaac taagataaaa tgattctaca tgtatatctt |
| 13381 | gacttatgtc tatattttat aatttcaact tttacgtcaa aaaattgtaa aatgtcacta |
| 13441 | attttataag gtttaattta acagatcaaa gctcatagga ctttgttgaa aacaatgaat |
| 13501 | gcaaatcctc agtacagttc caggtgtgtc atgagccctc caaaaatgat agttacaatg |
| 13561 | actgtttcaa aaaatttata ccttcaacaa aactttaatc ctatttttat atgcctgtct |
| 13621 | gctctgaaaa taatttaata tgtttaaatt cctagaataa atcttacttt aaccaaatta |
| 13681 | ataattctta aacttaaatt tagatttcaa tgaatcccca aaatggtttc cacataaagt |
| 13741 | aatgcagcta atatcagcac tgctaacaga ttacacagaa aggtctatta taatgattga |
| 13801 | gtaaatattc ctgggaaatc aaccttgtta aatctatatc ctataaggaa aggtgcatat |
| 13861 | ctgttttttc tagtaaagat tccgtaattg ttattacaag ttaatcagct tctcccaggt |
| 13921 | tcatttactc tggattttat taatttatta caggaaatta ttgggtaagt aaaccacaat |
| 13981 | tataataaaa tctcatacat tttattatat ggttcacaaa ctttataaac acctgtgatg |
| 14041 | ggattctgct attgatattt aagtggatat ttattaagga actagagata cttctcagta |
| 14101 | agattagctt agagaacggt cctgtttttg atctcttaag attccaaatt tttattccaa |
| 14161 | attttctgat attgcccaag tgtcttttct gaatctatgt ctttattatt tggcttaaaa |
| 14221 | cctttgtgca tctggtgctc tattctgctg tgactttgga gaaaggttac agtttgtttt |
| 14281 | tgctgggagg aataacttct tgaatgatgt cccaactgaa aattattttt ttggttggat |
| 14341 | agaacatccc tgtacaaaac ttcctctatt atcccttgga taattcctgc tgtatataga |
| 14401 | ggtccaagat tgattaatga ttttatcttc agtaacctgt gatctaaatt accattggca |
| 14461 | agacaagagt gatacctgtt tttttattct ctacattaat aaaacatgcc ttaagaaatc |
| 14521 | tatatacttc atatagagga tatgatttgc cactaagcaa actctatgaa aaagaattgt |
| 14581 | gttttcatag taaggcttta ttataaacca aatatgacca actttcagct aaactgtatt |
| 14641 | atctaatcaa gtttattccg tcactttact tgctattatc aataagacaa gtaatatatt |
| 14701 | taaatataga ataagtaaca agcaacatgt taactgaatt aatatattgg taaaatatag |
| 14761 | attttaaaag ttttttgaaa atatttgagg agggttgcac ttttgctccc tctgatttta |
| 14821 | ctacgtatgt ctctgactgt atgtaatcac acctagctta tgctgtccct tccattctct |
| 14881 | acacttgact ttagaaagtc aaacgtagac tggagcaaaa aggggagaga tcttttccta |
| 14941 | ccatttagca gattaaaagg tagattggaa atgcatctca gtatctcagc cataaatgtc |
| 15001 | taagggataa taatcccgct acatatttat taaactaatt acaacatatt gcgcaaaata |
| 15061 | aaatactttg aatcagaatg acttatgaat ggtcgattgc atacaaaagt gctggagata |
| 15121 | tggtgataaa aagatgattc agccatcaca aagctcaaaa ttctactggg agaaacaggt |
| 15181 | aaagtgactg aagcccagga taatatttca aataataagt acagtgagat acttatttga |
| 15241 | gagatgcaaa ctcaacaaca gtttggtaag tactttctct attctaattt gaatacattc |
| 15301 | tagtcaattg agatacacaa agcatcaatt ctccccattg gatttggatc ccataaaact |
| 15361 | acccatttcc ccaaatagat agtgttttaa cttaacagac ctcataaaaa gcttgacact |
| 15421 | aaaatgagaa tttataaatt gtgatctgta gtaagttaaa tggtgcccaa ccctgcgaaa |
| 15481 | aacaaaaagt atgtccatga actaatccct ggaacatgta aatgtgatca aatagggaaa |
| 15541 | agatatcttt gcagatataa ttgtaaagaa tttcaagatg agatYgttat ggaatatctg |
| 15601 | agtgggctcc aaatctaatg gcaagtatct ttattagaga aagacatacg gggatttaaa |
| 15661 | acagaaaagg aagaggagac agccatgtga aaatggagac agagattgaa gttatgcagc |
| 15721 | cacaggtcaa agaatgcttg gaaccaagag aagctggaaa agacaatgaa agattttccc |
| 15781 | ctagagcctt tggatagagc cctgcaaata ctttgatttc atatctgtcc tctggaactt |
| 15841 | ggagagaata attttttgat gtttaagcag atgactttgg ggcagtttgt tatggcagcc |
| 15901 | attgaaagca agtcgtgatc tagtttgcct tattttccaa agcatagata attttcaatt |
| 15961 | tcaattagga aaattgaaat tccacaaaat gcaagtgcat acagaaatgt ctatctgagt |
| 16021 | tgcagttggg aaacattttg catttaaaaa ggaaaagttt taagatataa aagaaagtct |
| 16081 | tgagaaaaca agagaatatc cctcatatat gtacaacttc ttactaatag aagccttaga |
| 16141 | tgtctgatca atttcagagg caaaggctac cattgactgt tcattgacca ttgacaagcc |
| 16201 | atgtgtttca atgatgaaat accacataac aaaatactct aaagcatatt gtcttaaaac |
| 16261 | aactgtttta ttactaaggt tcctgcggat ctgatattca ggcaggattc agtggggata |
| 16321 | gcttacctct gttctacatg gcgctcactg ggatagttca attagggtaa gaggattgaa |
| 16381 | gatggtatca tttgcatgtc tggggctttg gtcctggctg ttggctgagg tgctttagtt |
| 16441 | acccttttct ctccacatag cctctaatta ctcaatattc taccccagcc tttaaaaaaa |
| 16501 | attttattgt ggtaaaatac acatataaaa tataccatct taaacatttt aagtgtacag |
| 16561 | ttcaatgata ataagtacat ttatattcct ttgcatccat catcacccat ctattttcaa |
| 16621 | aactcctttc atcatgcaaa actgaaactc tatacttagt aaacaatgat tccccatttc |
| 16681 | cctctctgtc cagcccgtgg caactgctat tctttctgtt tctatgattt tgaccatttc |
| 16741 | aagaaactta tgttaagtgg aatcataagg tatttgttat tttgtgactg attcatttca |
| 16801 | cttagcataa tgtcctcaag gttcatccat gttgtagtat ttctatcctt tgtaaggctg |
| 16861 | actgataagg agagacttac ttctgtcatt taaaaacttg ttttctatat ggcttatagc |
| 16921 | atttttgtcc cttgcttcct gcgtgactgt cttcttttgt gtttagttga ttattgtaat |
| 16981 | gaaatgttta tgtatctatg tcattgactt ttgtatattt tctatagcta ttacatttaa |
| 17041 | catcctacag ttataacact cttatttaga tttatgccag tttaactcca ataatacaca |
| 17101 | aaactctctc ttttacattt ccatacccac ttcttttggt tgctgatgtc ctaaaactac |
| 17161 | acctttacac attgcaggtc caaaaacaaa aactaataat ttttaaatat atcagtttct |
| 17221 | tgaattaaac cattgttaca ataatagtag cttttataat tgtccatata cttaccttta |
| 17341 | atcttcagaa ctcacattaa cgtttcttcc agacaagtct agtgttaaca aactcctctc |
| 17401 | aacttttgta tacctagaaa tgccttaatg tctcccttag tttgaaggaa atttttgcca |
| 17461 | gatataggat tcttgcttga caggtttatt ttctcttagc actttgtata tattggccca |
| 17521 | tttctttatg gtttccaaaa tttctgataa gatatatgct tataatttta tcaaaaatcc |
| 17581 | cttgtatgtg attaatcact tctcttttga tgtttttgat attctctttt ttgtcttcat |
| 17641 | catttcaaag gttgataatg tggatctctg agctcattgt atttagagtt tactgagctt |
| 17701 | cttaaatgtt tatattcata ttctttgtta tatttgggag ttttggccat tatggcttca |
| 17761 | aatatcctct cttcttttct ctgtcttctt atggactcca taatgcatct gtttgtccac |
| 17821 | ttgatggtgt accaatggtt ccttattctc tgttcacttt tctttaatct tttttctttc |
| 17881 | tgttccttgg attgataatt cccatggtct tctctttaca tttgctgagt ctttcttctg |
| 17941 | gctgcttaaa tctacctttg aaaatctctg gcaaattttt ttcatttcac ttgtactttt |
| 18001 | tagctacaaa atttctttct acttttaagt tttctatctc tttatggacg tttataattt |
| 18061 | attcatgtat tatttcttga tttcctctac ttttctttta gttctttgag catctttatt |
| 18121 | acagttgttt tattacagtt gtccagtagg tcccccatca tgtctttttc agtgacagtt |
| 18181 | tctgttggct tattttattt tatttttaaa tgagccattc tttcctgttt ctttggatgc |
| 18241 | cttataattt ttttttgttg aaaattagac atgtgactgt agtaatgtag taactccggc |
| 18301 | aatcagattg tacttatttc tcctaggttt tcctaggaga aatttcctag gttttcccct |
| 18361 | tttgttctaa atgttgtaga ctagactgtc tctgtgcaaa ggatcaatct gagatgtacg |
| 18421 | taaatttaag gtcttctcaa gtctcttttg agcctgcacc tttccctggg catacacagc |
| 18481 | aactttctaa tttcccgtgt gtatgtggtt gcttttaaat gtcttagtat ttaatgtcta |
| 18541 | cctccaaaaa gaggaaaaga gaaaaatgaa ggtggcaagc aggcactggc catttaaatc |
| 18601 | ccctggaaat tacttcagcc agaggggtag gggtgtgcaa caatggaggg gaggtgcaac |
| 18661 | aacagtgact acctagccct tcgtctacaa gtccgtgatt agaagcagca gtaagcaatc |
| 18721 | agagcacaga tctccaatat ttggattata acattccttt tgcccatgct ggcttttgtg |
| 18781 | aactgcatgt aagttgctcc tgaaacatat tcatgNctgc ctgccattgg actaagggtc |
| 18841 | aggataggta gctgctactg ttttaagagc ttaaattgat caaaagtaac cataattttc |
| 18901 | cttataagct ttccactgga agtttcaagc cttcaataga ctccagaact ccagaatatt |
| 18961 | tatatcagat agattctgcc agtgcagttg ttgcctacat ggggagacag atttctggtg |
| 19021 | ctttctattt tgccagcttc ccaaaatctt cctttctaat cttgtttctc tccttgaaag |
| 19081 | ctggggagaa ccagctgtaa ttctaatttt tgttgttagt ggactatggc tgtgagaaat |
| 19141 | gtcctctgga tggggatgcc actaccccct acacagctca catctcactc acaactttgg |
| 19201 | ttttcccctg ctctggacca gccttttttt atttctttat ttctttttca cttgattggc |
| 19261 | ttccaaaaat gagaagagaa aacctgtgag atctcttaag attcatgcca ccaaatcata |
| 19321 | tgtcatcact tctgccacat tttactggag aaaactcaca gagcaaactc agattcaaga |
| 19381 | aaaggggctg tcttagacct tttgagcttc tataataaaa taccttagtt tgggtaattc |
| 19441 | ataaatagta gtaatttatt tctcagagtt ctagaggctg agaagtcaag gcatcagcag |
| 19501 | attcaatacc tggtgaaggc ttgctctctg cttcgtagac ggcacatctt gcagaagggg |
| 19561 | tgaacagtat cctcacatgg ccaaagggga aggcaacttc cttcagttca ttttataagg |
| 19621 | gagctaatcc tattcatgag ggaagaaccc tcgtgaatta atcaccttct taaatcttta |
| 19681 | atacaattga gttccaacat atgaattttg gagcgcaaca atattaggga agtggactcc |
| 19741 | atctcttgaa agaagaatgg tatgtgtgca cagggatagg aggaattatc tgtggccatc |
| 19801 | ttgcaggcag actaccacac agtgctctgc tttttcttat cattttcttt gatgacatct |
| 19861 | gatcctttct cacaaatatc tcctttgtaa aacactcagc acttattatt tatatcagtc |
| 19921 | atttgggaat tagtcatatg ctgcctagtg gaatttgttg tcattaaaaa ttttttcctg |
| 19981 | ttttgtcatt tcaaaaacaa tcacaaactc ttggaggtta aagatgatgt tctatatttc |
| 20041 | cttgtacccc gtaaaaccag catagtaggt atttaataaa taactgtctt cttaattata |
| 20101 | aattttaagt ggtgggagaa tgatgtattt acactaatgc acggtggttg tattattatc |
| 20161 | cactagattg tttcttgctg catatcatgc actgcattat ttcttgctgc atatcaatca |
| 20221 | cttagtactg acctcctttt taaaatacgc ctgactttct catgcttatc ttacatatat |
| 20281 | ggttatagct aagagttgtg aatggacaca gatatgggaa gcatatttag gaggattaac |
| 20341 | aaaagagtaa ttagaagaac acataaatcc acaaggaaaa aatgactctt tttgaagtat |
| 20401 | gctagcattt tcaacatgcc tgttgagtta atgatttatg ggagtttcaa ttgtttaaat |
| 20461 | gtttggaata ctctgcaata aaataaaaat tctcttcaaa gttgataaaa atactcagag |
| 20521 | gcatacttcc tcatctgatg attcatagtt accaatgaaa cccaagaact ccatgcacat |
| 20581 | tttcagcaag agcaaggaat ctgatagcaa gagagctgga aaggaagaat catacagtga |
| 20641 | cctagacaag tgtcatgtcg gtcttagcat cagataaact gattgcaatg gttgattgta |
| 20701 | ctatctctag cgagagtaat ttagaaaacc tgaataagaa accctctctt gttcatcata |
| 20761 | gggatgactc ttggtgtgaa cccaatcata ttaaacaatt gtagaatcac caagctagac |
| 20821 | attttatgag actaactgat ttattcctca tcttgaaata aaacctgcat gccacaaaac |
| 20881 | tcctctatgc tgctgagact tagttctttc tttgagaaaa ataagagcca tttattcatg |
| 20941 | caataaattt tcattgtgtg tgaattgtat actaggcctg ttccatgtgc ttgccatacg |
| 21001 | tcagtgaata gaagaggcaa agatctttgc ctatggaact tgcagtctag taggggacat |
| 21061 | aagttatttc gtaagcttcc cctttataaa tatcattaat ccttactaat aataatactt |
| 21121 | acatcaatgt ttatatattt tacattggtt ttctgataat ataaaaaaaa attcacaaaa |
| 21181 | taaacccaac cactaataag ctgtgagttt tgagtgtaga attcttttca ttaacaaacc |
| 21241 | atttcatttt cagatcgaga aactaaggtt tttaaaaaac tgattttact gaaaataaaa |
| 21301 | tctaaccacc catcctaatg ttctttactt ctttatctgt ctttcaaaaa tatcttcctt |
| 21361 | tctctatgtt gagttagata tgtattcaca aaatctacca tactgtccat atatgttaga |
| 21421 | tataaatttt tgagctcatg tgaaagaaac caagtttgaa tagttgaagc aaaacagaag |
| 21481 | ggtttattat taaaaaaaaa atgtgttttc tcaaggaccc caaaacacaa agctgaactt |
| 21541 | gagaagtgag cgctcaaaac tattaaggct gtctgcatga cccttgctct aattcctctc |
| 21601 | tgaaatagtg tctcattgat tgaggtaaaa aatgacagca gtttctagag ctacactgcc |
| 21661 | tgtgttcaaa tcctagctat gtcatttgtt agctgagtag cctggaacag gtaaattaat |
| 21721 | ccctctaatt ctcaatttcc acatctgtta aaattagcat aattataatc atatcaggat |
| 21781 | aattctgaca ggattatagc aaaaaaagat taaataatat ctaatgactg gcacaatacc |
| 21841 | tgcctcataa atataagtct tcagtaaata taaaccacca ttattaaata ggagatgtta |
| 21901 | agaattgagc tgagctgggg agggctgagc tgccagatgt gggagtattc agtaagacaa |
| 21961 | caagccaaaa tgaaagtaac gattaagctt ttattccact tactgtgata gtataatcaa |
| 22021 | gagtccagaa agaaagtgcc agcttcacct gtgtttcatt ttccctacaa atggcaccac |
| 22081 | gcaagggtca gatgcattag tacagttttg gataactgtc ttactgctca gggaacccca |
| 22141 | aacaaaaagt tcctatggtt ttatggacct aagggcagga gaagaagcaa ggggaagatc |
| 22201 | taggaatggg aaagtaccaa gtactaagtc agaatggaga aaagtgtcct ccagggtacc |
| 22261 | cactcctccc aacaagcagg tcttggcaga ggctcctgga aaggttcatc tcagagtccc |
| 22321 | cagtaaagaa gcctctgaat ggaggctcct gggctaagaa tgcaaatatg tataaaacat |
| 22381 | ggctggccag gggtcctaag tccttgactg caactcccgt cagacactgc agcacattgt |
| 22441 | ctgtgcaagt cagtttgggg agggaagctt tcctctgtga aggcctccca ggcaaagcct |
| 22501 | ttgtattgcc tagggcaggg caaaatcata cagaggtttt tgacttggag ctggattcct |
| 22561 | tgagaggatt tctaggagaa atcctcccaa aagtttcaac agtttatatt tcatttgtat |
| 22621 | gttggtggtt ctctttcaag tgagatataa tatagatgaa aagtatctaa catagattag |
| 22681 | gtattactct tattattact atagctatgg ttgcttgtat ataactgttc agattatagc |
| 22741 | tccaataaaa caacttattt tattctctcc agagttaggt aatatcatta ttcctcatac |
| 22801 | tgaaggcttt tgaaaaatgt tccttggtct ttactataca gagtttaacc tttctgctct |
| 22861 | caggaagaaa gacagttgga aattcaccat ctaaatttaa aagggggaaa aatctcagct |
| 22921 | gatagctggt aacacagtgt tggctatgta ttgagatact tacttaaagc atcatataag |
| 22981 | aaatgatgta caggccaggc gcggtggctg atgcttgtaa tcccagcact ttgggaggcc |
| 23041 | aaggtgggtg gatcacctga ggtcaggagt ttgagaccag cctggccaac acagtggaac |
| 23101 | cccatctcta ctaaaaatac aaaaattagc caggtatggt ggtgtgtgcc tgtaatccca |
| 23161 | actactcggc aggctgaggc aagagaatcg cttgaacctg ggaggccgag gccgaagtga |
| 23221 | gccgagataa tgccactgca ctccagtctg ggcaacagag caagactctg tctcaaaaaa |
| 23281 | aaaaaaaaaa agaaagaaat gatgtacaat cactttaatg tgtattaagg ttcttgttta |
| 23341 | aaaatcatct aaatttgttt agtatccaat aaaaattgaa gtctcacttt gtgccaataa |
| 23401 | ttatgtattt aataaatggg aagaggaaac aaaacagtaa tttttcttga acacgtggaa |
| 23461 | atttatagat aattgctgca ataaatatta tcatacaaaa tatatattta aaaaacttaa |
| 23521 | ctacaatatt actgtaaaag agaggaacat gattctatat tacagtgata tgaggtagcc |
| 23581 | tggggtgggg gcaggagatc aaggagagtt taccccaaac tacaggtgtt tatattgaga |
| 23641 | tctaaaggat gaggaaaaat tactttacta attcattaaa gaattgcagg tgtcttaaga |
| 23701 | ttgttccagt caaggaaaac tgtatattca aaaccactga ttctcacatt tggctctact |
| 23761 | ttggaatcat cttcataact ttacacaata ctgatgccta gatttcatgc ccagattctg |
| 23821 | atttcattgg catggggtgt ggctttggtg tcgggatctt tttttataac tcccctagcg |
| 23881 | gttctgataa gctttagtca gtgctttaga aacaatgttt aaattttcaa ggtaggaggg |
| 23941 | ttatgcctta ctcaagaaac cgtaggaaga ctcatatgat ttgaattcaa agaatgagag |
| 24001 | ggaaggcatt atgacatgaa tYgatgaata taaataataa caaatcatgc aaattctggt |
| 24061 | aggccacatc caaagtttgg cctttatctt gagaatactg gaaaactatg gaaagacttt |
| 24121 | aagcagatgt tataatctca gaatttatgt ttgcaaagaa agactgtaaa gagaagctat |
| 24181 | gaaattagct tcggctagga tggtaggaag gaacgagtta aatagattca ggagacattt |
| 24241 | ttaaagaggt gaaattggca gagctgggca aaggattgga tctgagaggt ggtgagactg |
| 24301 | acagcttgat ttttggctag tgggactgag ctgatagtag ggatagatag tgagcttaat |
| 24361 | cttagagata tctgagctcc ctttgaggta tctaagcaga gacagtgaag tgatagtgaa |
| 24421 | atataaggag attgctgagc ttgagatttt tattgtttag gagtaaagat ctaaattgca |
| 24481 | atagagatgc tttacactaa ccttgtcagt ttcataaaaa ttactttact ggtacaaaac |
| 24541 | atggtaaaag gcactgtaat agacagaaaa atgattcaga tggtacccat gaccttaagt |
| 24601 | ggttaattat ttaatggagg agataggaaa gacagtgaga atttaatgtg attttaaaat |
| 24661 | gaacatctta aaatgtctca aggtagaatg gaatagaaga gaagaaaatc cagcaacttt |
| 24721 | tatcaggttg taataattaa atgctaaaat attattagaa aaaataataa tattgtgatc |
| 24781 | tgatagaaaa ggaaagctaa tagaatttga gggaggggaa tgaccccgaa gaatcatgaa |
| 24841 | aactctcagg gatacaacat catattagga cacggtgtct agttggaaac attttggttt |
| 24901 | ttcattcagc ttgaactgga gaaccaaaaa gaaagaagaa taaagaggac agcaggagtt |
| 24961 | ttaaatcatg gatttgttta ttcaaatctg ccaYgtaaca atacaacaat actatgataa |
| 25021 | gagctaggag tacaactgtg gacaaggtag tcatcattct ggcacatagt ttataggttc |
| 25081 | atatcatatt tattataaaa aatagtttac ttgagacaat atccctagtt agctttcaca |
| 25141 | aaggaaacca gtcaaaataa tgactttatt aaaagaggtt aagtagccat tctatgagtt |
| 25201 | tgcattccct gtgtgttgaa gcaagttttt ttttttcttt tttttttctt tttttgagac |
| 25261 | agtcttgctc tgttgcctag gctggagtgc agtggcaccc tcggctcacg gcaacctcca |
| 25321 | tctcccaggt tcaagcaatt ctcccgcctc agcccccaaa gtagctggga ttacaggcat |
| 25381 | gtgccaccac acctggctga tttttgtatt tttagtagag acggggtttc accatgttgg |
| 25441 | ccaggctggt cttgaactcc tgaccttagg tgatataccc gccttggcct cccaaagtgt |
| 25501 | tgggactaca ggcgtgagcc accgcaccca gcctgaagca agttttaggg cagtggtttt |
| 25561 | caaccttggc tatacattgg aattacctgg aaaggctttt aaactactga tgccttggtt |
| 25621 | atactcctgg ggattctgac ttaattgtcc tggggtttgg atggagcatc agaatttttt |
| 25681 | aaagctttcc attctaatag tcaacaaaat attctaatag tcaacaaaag ttgaaagcca |
| 25741 | cagttttaag ggcatgtttt atcactcaga ctactaagtc acccgaaaaa tgagactgag |
| 25801 | caaggaacaa aagaattctg attatatagg aaaaataata acaaacattt ctttagtctc |
| 25861 | agtgtgtcat gaacacttct aaacacttaa catattttaa atcagttagt ggtcccaaaa |
| 25921 | actgtatgag gaagtcactt ttactattcg catttgagag atgagaaaac tgaaacccaa |
| 25981 | cagcacacgc aaagtaagtg ttagaacagg tacttgaact caatcagtct tcttctagag |
| 26041 | cttcttatct gaactggtat gctatattgc ctctaaatgt agtgtaatgg taattttata |
| 26101 | ccagaagaat tataaaagaa aggaaaacct ataaaaatag gatatcatta aatcagttaa |
| 26161 | atgctagttg ataatagagt gattattatg actgcataaa acatctatgg gttatacata |
| 26221 | tgtgtatata gacatatata tgtatatatt tattcaaata tgtctatata tagatatatg |
| 26281 | tatacatatt tgtatatata tgtgtgtgta tatatatgct ggttctcatg ttttcttcat |
| 26341 | ttgtaggaat cagttaacaa gttcttgtta catagtatga aggttctgtt ttcagtagtg |
| 26401 | aaacagggag ataaaagtgg ttgaaccatg tgattttttt tctgactttt caaagacatt |
| 26461 | ttctcctgaa ggaagctcaa gtgctaaggc tattccacat aatctcaaga acgactacta |
| 26521 | ctttatagta atgaccaaac tgtagtaata gaatcttagg agcatataat catcctctag |
| 26581 | ggaacacatt ttacaaattg aacctatctt gcaggtggaa ataccataaa gaaaatKatc |
| 26641 | attggagaga ttactggcac actgcattca ttcacatgtc aaagtggaaa acattccaat |
| 26701 | ttacttctat aaaacatgta tctgagtcaa cctgccatat gtatttttta cactttctat |
| 26761 | ccccttacag aatatctacc aaataaatgc tgcacatttc taagtggctg gcttttaagc |
| 26821 | tgctttgcct atggcttttt gttccctctt tttctcagct gagaaatcaa gtaaacaaaa |
| 26881 | cattgtggct ggtagcatag gtcctcagtg cagtggatat tttgtgtccg gcagctggag |
| 26941 | cattggtcgt acagatgggc ttcatttgtt ccatatgaat acaagttaat aaatggagag |
| 27001 | aattccattt ggtattcaat taagatctcc cctgactcct gttattaaag cctacaaact |
| 27061 | attgagcata aaattaaaat cgagcagttc agctcttttt gacattataa cactgcctga |
| 27121 | aaaataatgt aaaacccaag agtcacaagt cattccttac agcccatggc aaataagaag |
| 27181 | tggaaacatt gaggaagaaa gagtaaatat ttaaaacttg atcattagta cacatgttag |
| 27241 | gagcaggcta ctgtgctcat gcaaatacat caatccagtt tgttgaacac aagatattac |
| 27301 | attaatttta acagaatgtt acaagattat tattgccaaa gctccaatga aggaaataat |
| 27361 | taaagcacta ggcattttaa ggtcttaaaa tgacagaaaa tactatagga aatcaataac |
| 27421 | cagaaaatac tatagaaaat caatatactg taattgaaag gaaattgaat tgggtttact |
| 27481 | ttttttatcc cgtctaaatt ttcttcagat tgccagacca ctgaagatag tgaatcttgt |
| 27541 | tttgccatca gcagtgtgac tttctctaag tctcatgtgc tgcaagggcc atctttattg |
| 27601 | ttttttattt aggaagcact cagctgaata gacaStatga gattttgtgt gtgtgttctc |
| 27661 | tttactagtc ttggactcat tgttaaaaaa aacagaaaca aaatcaaaga cacagcagac |
| 27721 | aaaaacaacc acctccacat aaccagagaa gtcaaattaa tgagaattca gacatcgaaa |
| 27781 | ccagaggact tgttagataa gcctcacact tgaacctaag tgaaattctt ctagttttta |
| 27841 | tcaaacacta tgcctgtcat tcttgctatg caataagaaa cattaccagt tgcagataca |
| 27901 | aattcaattt gaatctatat gaatctaact cattttcatt gcttattatt ttaaaaagtt |
| 27961 | attataatca aacaaaaaag cttgaaatga acctcaggga ggtaagtgga tatgaacaga |
| 28021 | aattaaagaa tgttaaaatg agaaatccag actgggtgct gtggcttaaa cctataatcc |
| 28081 | cagcattttg ggaggctgag gtgggagaat cccttgagcc caggagtata aaacaaaaca |
| 28141 | cttaacaatt ctgagtctca atgtcgttga ctataaagta gaaatatctt cccttcctac |
| 28201 | cttaaataga tcacatttat gaaaaagatt cataagttat aaaacaacac ctcaatgaaa |
| 28261 | aatgctgtat ctggacttta aaaagaagtg aattaaatac taattttacc tcttagtata |
| 28321 | tatgtgatct taatgaagtc cttagttttc ttgtctgtta aataataatg gtaagggcac |
| 28381 | cttctcatat ggtcattgtg aagcttacat gtataaaaag ctcagtacca tggctgacac |
| 28441 | atagaaagta tttaacagtg ttcaaaaaca taatcaatat aggaaataag tattatttta |
| 28501 | tttccttaat aatttcttag ttatacccca ttatcatatg tgataagaga atgtacttta |
| 28561 | tttctagttt tccagataat ctgtatccta aacattcttt actcccaaat tcagtctttg |
| 28621 | agcatcctaa ctcttgacat ccacagctaa tatttaggaa acattaaaat ttgtttgtac |
| 28681 | atttgaagga agaactaagt aaatggaact taccaatcct aaaatccaga ctgctgttat |
| 28741 | taagaagaag aacaactgta caaatgctgt taYcaaagga tgtatgagtc aggcggaaaa |
| 28801 | aaaaggagaa cacagaaagg tgaaaagtct ttgtcaagca gaggagagaa attattgtct |
| 28861 | tgtaatatat atgagagagt ctagccaaat attaaacatt tttaaaatga aaagaaatat |
| 28921 | tatacatggt atgaataata tttaagtcat tgcctaggtt agaagattag atatatttac |
| 28981 | ctattctacc tacttcaaat gcttttttgc tgtcattgtt tggaacctcc aaatactaga |
| 29041 | atgctttaga attataaaac cattgaccat gttcagttat gtttaaaaga aaacatcatt |
| 29101 | ctgaggaaac tggaaattat atatttataa atgtttgtcc atagcattgt tgaaacaaat |
| 29161 | ggctcaggtt tcactgttaa tccagttgct gatatttttg actactcaat acaccaaaat |
| 29221 | ggtacagtca agttggtgct aatagatgtc atttatttac acaaactgac aataggttca |
| 29281 | ccaaagttaa gagacgaatt taagggggac agaaaagaaa ttcctgtgtg tgctttggca |
| 29341 | gcttagacat acttaccacg aacaagatta tatcttaaaa gctattcgtt aagcttaaaa |
| 29401 | ttaagttata tggttgtaat atgtggagaW agcacattgg aatagctctt cacttaatgt |
| 29461 | tatagatcac tttttccacc aatattattt ggtctaggaa agtaaaatcc tcttgaggaa |
| 29521 | gtaattagaa aaagcacaca tcagggaatg taattgaaga tagacttttg ttgacctcag |
| 29581 | aagagaaaag ctcaaaagaa atttcgtaaa gttttaaata tggcaagagg accacaatgt |
| 29641 | ctttgataat tagactttca acacatttgg atttgctaat tggatctaag ttctaattag |
| 29701 | gctttttatg taactaagaa tgacatatca ttgtatgaat ttaatgtgct tttacagttg |
| 29761 | aaactaacaa ttagcagcct tttccaaatt attttaataa ggaaaaagct ggctctgctg |
| 29821 | tttatactgt gacattccct tctcttaaga tatattatgt acattttcat tttctWaatt |
| 29881 | aaacaccttt tggggagctt aaagggaaac ttgggtttta ataggaagca cctaaattgt |
| 29941 | ttatttgtgg gggagacttg ccagccagta tgtagatgac tttggaagct acagacaaac |
| 30001 | cgcaataaaa agaaataaat cacaatcatc aggaggaaac agcacaaata accatttgcc |
| 30061 | cctatgacca ttcagttaat caaaacagtc tctgaatatg atgaaagatc tgttacattt |
| 30121 | ttaagtgtgc acatgcggaa tatgttccca aatgtgaagg ctcatggatc tgctttcagg |
| 30181 | atgaataata ggaaatttct tctcaagatg tgcattacaa cattctctct ctctgtagcc |
| 30241 | ttgttctgta aacagttatc tgctaattca agtcaaatca tctctttctt tctccatatt |
| 30301 | tttgattgag agtcatcaat ttttatccca ttcagatata tagacagtaa tttaaaaact |
| 30361 | ggtRgccctc agatttgtac attccaagag ataagaccta tataacagca taaaattaaa |
| 30421 | ctactatttg ggtgagtaaa gagcagtgag tcattgcaag actttaaggg aaaggctgct |
| 30481 | gccaaaatat tccaagcaaa ttgataacac tgccaaaaag gcaaattata ttgttttatg |
| 30541 | tgctatgaat actttgaaaa caaagacata cacatgattt ttttcaaata aaagcagttg |
| 30601 | cccttctaac catattaaaa atagtgtctt ttttcccagt aaaagccata taagatcaaa |
| 30661 | ttaaaaccat tgaaactatt agagaatcta acttacagta attgatatat taaaaaagac |
| 30721 | attatgttag agttatatgt gctattattt ttccaattag tacattactg ggactgagtg |
| 30781 | attggtgtat acataagtcc tcattaagta aaatgtcctc aatgagcctc ctaaagcaca |
| 30841 | ttgggtactg tcatgtgcca tataatgata tttaagagca agaaatggca tatctaataa |
| 30901 | cttcatttcc tatttaaaaa gaaaacctgt gcagtactct ttccatacca attattctaa |
| 30961 | gagctatcac atagttctcc ataaagacta tacagaggtg atgggactgt tcttcaggca |
| 31021 | gaaaaatgac caaagttgtc ttatctttca gcttggKtgc tggaatcctg tcacaggtct |
| 31081 | gaatgggtca ctgactgaca agaaattgga gaataacatg cgtggagtgg ttctacgtgt |
| 31141 | agtaactgtt ctggtaagta ttatctgagc ctcgtggttt tgacttttgg aggttacttt |
| 31201 | atcctatatt tctttcttta ttaactgatg acataatctt aaaagagatt ttaacaaatt |
| 31261 | ctaaatacgc tttctaagat tttttaatgg tcatatttca cagccttcaa tttacgtgga |
| 31321 | tcaggatcac agttttgcag acttttaact acagtgtatg tgttaggaat tttcttagaa |
| 31381 | attttaggct caatttccat cctacagttt tctacacatg acaaagtaaa ggtatgtctc |
| 31441 | aggccttctt tcattaaaac tgtagtgaac atagatagtc aacatatagt gaacattgaa |
| 31501 | actataaatg aacataaccc tgaccatgcc aaacaatggt agatttggta aaatgtacat |
| 31561 | tctctaatag tgaaatatta acaaactaag aatctttttc tcgtaagaac ctacttcaaa |
| 31621 | gggaagctgt tgtttaatag gcatctactg tcgactgtat tccaggctca gtgctgatta |
| 31681 | ctgagaacat tgacaaataa aatgacagat ataattctgt cttgatagaa cttatcatct |
| 31741 | agtgattctg tgaatgttga ataggattac agtagtttcc cYttatctgt gggggatgca |
| 31801 | ttccaagacc cccagtggat gcctgaaact gtggatagtt ttgttttctt ccaacacaat |
| 31861 | cacattgtgt agggcttata ggttatagag tgtggatatg ctggacaaag ggatgagtca |
| 31921 | catccagggc atgtcagtgg gatggtgtga gatttcatca tgctacttag aacaatgtta |
| 31981 | aattcaaaac ttataaattg tttatttctg gaagttttca tttaatattt tttggaccat |
| 32041 | ggctgattga ggagtaaccg aaactggtga aagagcaacc atggataaga agagtctact |
| 32101 | gtatacctgg gaaagatctg ttacaatttc atttacttat taaaaagtca ataaatggta |
| 32161 | actgttataa ttctatacat tatagttttc tttcctaata gatacataca ataagatgtt |
| 32221 | aatagaaata ttcttaaaca gtaaaatact caaatgggct ctgtctaaat agccataaac |
| 32281 | cacgaaggca tacattctcc tttgctattc caatgtgttt aatcatgtgc tagtttatag |
| 32341 | cctgtttcaa aacgtaatag tccatagtta gtactttatt tttcttcaga aaagtctact |
| 32401 | tgtttttaat tttgaaaaag attttcctat gggctaggta aattgcagaa ttagtaaata |
| 32461 | ggagaggaag actttttgat acgttgatgc taattggatg ttcatcaaat tttataacac |
| 32521 | cagttgctgc cctttgtaca ttgtttacta caaattaaat atatgcaatg taattttatt |
| 32581 | gtcaaaaaag tggatttgtg catattttct atgaaaggac attcaagtga gtgacctatt |
| 32641 | cttctttttt tgtggcccat aaattattcc tagttattat ttttaaaagg gcttaattgc |
| 32701 | ttttggtaaa taattgtaag tatttcacaa cttaaatgtg aattcgcttc tgtatgtacc |
| 32761 | taagggtatt gatatgcatt tacattgatg cactaatatt aaaaaagaca gatatttaaa |
| 32821 | gtacagcaaa ttattaatag tctttcctcc agtgattagc atgaaaactc cagtgatgat |
| 32881 | tgcagtgaaa gacggtatat gtgctttgtt ttcctttgag aaaagaaagc aaatctttaa |
| 32941 | gtccaattaa cctcagtcag ttttaagcaa atagttattt cgcaattact atatgataga |
| 33001 | ctcagtaatg gatataagag aaataatata cagaccttgt cctcaaagta ttcatagaat |
| 33061 | cttgttaggt tgatgcacat agagaaaaac agctcagatt gattaaatat ggttgaccct |
| 33121 | tggtgtctgt gaggcattgg ttccaggaaa cccccacacc aaaatctgca aattcbtaag |
| 33181 | tttctgatat aaaatgatat agtatttgca tataacctat gtacctcctc tcatatgctt |
| 33241 | taaagcattt tagattactc ttaataccta atacagtgta aatgctatgt aagtagtggc |
| 33301 | tctaccgaat tatatattta tttttgttat ttttattggg tttttttcct aatatttttg |
| 33361 | agcctcagtt tgttgaatct atggagttga gtctagatgM agaacctgtg gatatggagt |
| 33421 | gttaactgta cttactatgt gcaagctact ctactaagtc ttttgcatgt attgtcttat |
| 33481 | tttgtcctca caatattctc aagaaatagg taatattctg atctcaagag gaaactgaga |
| 33541 | catccagaag ttgaaataca tacatgtatg tgtgtgtgta tatatatata tatatatctt |
| 33601 | atcattaagg gaaggggtta aggtctagaa tcagacttcc tgaatttgaa tcctaactct |
| 33661 | gctacttact atctgtataa tgttcataaa tacatgaacc tagaagaaat tgaagaataa |
| 33721 | catgcaagga gcgattctac gtgtggtaac tgctctggta agtattacct gagccttgtg |
| 33781 | gttttacaga cagtaagtag cagagttagg attcaaattc aggaagacag attctagacg |
| 33841 | ttaacccctt ccctcttaat gatacattat actgtctcca gtcctactgt gataagtgtg |
| 33901 | agaactgagg tgtctataga attttgtttg acttgagagt tgaaaatgct tacgtctgaa |
| 33961 | taaggtgaaa gtgagtttta ttgggaagga ttgtaggtac aatcatgtta aattcatttc |
| 34021 | caggctgaat aaaacaattg ctattttgtt catgaaatag tagcacttca cacagtgtta |
| 34081 | acacctgcat accccaggtt caccttcatg actcttaata atctctattt cctgcaagct |
| 34141 | tagccctgca cagatattga atatggtttt gtgactggag acatggaagc agtgtttttt |
| 34201 | tttttttttt tcaagtcttc tatgatggac ttatcagttg ggtgccagtt gagtaacagg |
| 34261 | ttgttatact tattacatta ctacaatata caatcattgt gtttaataat tttgcatgct |
| 34321 | tcctatgtct ttctgtaact actctgagaa tggaaaccag tcattccctt cttatttatt |
| 34381 | ttctacaagt gccttttcag gtctagctct tagttatatg gccttgcaag cttcttctac |
| 34441 | tcaacactga gaaccactct cccctcaccc cacccagcaa ctcccgaatc ttgaggcttt |
| 34501 | acctcactaa accctgaaac taggatttaa tctatactca acttgatgtt gtcacctaaa |
| 34561 | cgcaacctcc caccccctta tattccaagt atttacgtcc aacactttcc agaagagaaa |
| 34621 | agggaaagga ccaatgtgta catgggaaga agctatttcc tcctttcttc tattgaaact |
| 34681 | gaaatctagt cttagctcta cccactccct cttttcttaa gaaattttat attatcaatt |
| 34741 | acaccaggtt aataaaatgg atttttctta ccaaaatttt gaaattccca ttcttatgac |
| 34801 | tgttgatatt ttattgactt gaaagaaata acttcatatt tattttaaac tacacaattc |
| 34861 | agcactctac tgtttgtgat cccatgggca aataagtggt gctctcaaac atttcattga |
| 34921 | agagttaaat agaggtatta ttgacgaaga tgtaaatagt gttaaaggaa tcaacaagga |
| 34981 | gtgttgaatc accagaacct acctagatga cttacatgaa gactgataag gcatgggagg |
| 35041 | aagcattatt actagacaaa gcaatagagc catgggagag agaccatcac tcatagtagt |
| 35101 | agtgagctac agtgcagaaa aagaaagaga atcactgcca ataccaaaat caggctatga |
| 35161 | ggaactggga ataagggata cactgatctc actcctctta tctatctctt ttcatggtct |
| 35221 | ccaactgcaa atccaaccag aagtcagagg ttatgggagc ctaagtaagg aagaccatga |
| 35281 | aagttagtct ttcaggacac agaggaaggc agtgaagccc tcagtgaatc cagaagaaaa |
| 35341 | gtagagaaaa accaacacga gcatctacca tttgatagga cctattataa gaaggttata |
| 35401 | tatattaact tatttaatcc ttataaaatt tcatatgagt ggcactaatt acattataag |
| 35461 | gataaaaata gggtacataa gagttaacta aatttctgcc tccatatagc tagcaggagc |
| 35521 | cagacataaa tttcaagatc agagatcctg gttccacaaa ccatgtcctt agccactctg |
| 35581 | ataatctKcc ttctgaatca gaatggactc atgttaggta taaatgaaat ttgatataat |
| 35641 | tattgagatg tgaggattgc atatgttgga ttgataactt aggagaattt tcctaaattt |
| 35701 | cttcatatat agatttcttt gtattcaacc atcaccaaag ccacagaaat atgtcttaga |
| 35761 | aatggaggaa aagaaagaat gataataaaa gcagtctcta ctacttggtg tctcttctaa |
| 35821 | tctctttgtt tccataattt gcccactgat ctttacttct taccaagtgg tccaagtgta |
| 35881 | ttactacaaa ggaattatga agattttccc gtttttaact tcctgagtta tgcaatgtag |
| 35941 | atagcaataa atgaccaatt aagtcattca attgttttca tggtaattca tgaaaacact |
| 36001 | attggaaaca ttactgagtt ataaacataa tcataatata tatgataata aaatggaaag |
| 36061 | gaattggtta caaattaaaa gaaaggcgtg cgaagctatg ctgcaacaag tataagatat |
| 36121 | ctgagaacca taaattggca tttgggagga gctcactgat tagtaattct tatttaccta |
| 36181 | ctttgattgg ccttaaaaaa gacatataca ttcctaataa acatacattc actcatgaat |
| 36241 | tcacacaaaa cagtcaaaga tcctgacttt agagagtttt tttgttgttt gtttttattg |
| 36301 | agacaggctc tcactccttc acccaggctg gagtacagtg gcatgatcat ggctcactgg |
| 36361 | agcttcaaac tcctgggctc aagaaatcct cccacctcag cctcctgagt agctgggact |
| 36421 | acaggtgcat gccaccgtgc ctgactaatt tatttttcgt agagacaggg gctcgctatg |
| 36481 | ttgcccaagc tggtcttgaa ctcctggcct caagtaatcc tcccaaagta ttgggattac |
| 36541 | aggtatgagc caccgcaccc atccagggag tttgattctt gcaagatatc ttctaaagct |
| 36601 | ctcaaaatag tcttgaaaaa ctgcagtgca gttgttctcc attaaataca caatagagca |
| 36661 | tttttttgcc tagaattacc ataaaaataa ttcaatatat aaattgaatt catatataaa |
| 36721 | tatatgactg gaagtctata gtaaagactg tgatagtgat ttttctgcat tttataaatt |
| 36781 | aaaaaacata gtttttcata ttttaatctc tctaaaatta ggatgcatcc ttcaacttct |
| 36841 | atttgcaatt gtaattagca ccatgtttgt ctttattagt gatgtgtaaa atagttgcac |
| 36901 | atcttacaat aggaaacatt ttagattaaa taatgtatgg tatttttaca aattaagtta |
| 36961 | atggatattc ctggaaagtt aagttaaacg tcactgggca agaagccaca taaagagaat |
| 37021 | aactatttta aagaatacct ccaaaagaaa aggcagtagg aaatatacca attagaaaac |
| 37081 | ataggacagt aatagcaatg agaaaaatta ctgtctaaat taaaactgtt gcctcaatca |
| 37141 | tagaaggata tacacagaaa taggaaatac acagagatag cttatcttga atcattacca |
| 37201 | caaagcaata tccaaaatat ctattgagag aatggtaggt ttttctaagc aactcaccaa |
| 37261 | aggaaggatt gtttgcctgg ctgcagcaga cagccaccta ctgagttatc attttgagta |
| 37321 | atttcttttt cctaaaaaat atccatcatt agtctcactt tttggaattt cttttttttt |
| 37381 | ttttatggag attgtgactg atatatgggc accagagtct taatttgtac aaaaacaaaa |
| 37441 | aaaaagtatt taggttagat ttagttattt atatacatca gcatgaagta aagcaatgta |
| 37501 | cttaatttcc tcttaatata ccttttaaca aaggaataaa taatatataa ttcatttttt |
| 37561 | attcaaagta cttcacacaa ttttgttgcc tttatttcac caagtctcct ctatttaata |
| 37621 | cacctatgct aagaagcttt ggcacacact gcaaaaagca ctSaacttgc agtcaaaagg |
| 37661 | tatgactttt agtatcgtac tagtttttct gcttaattga tctttgaatt tatggaaacc |
| 37741 | aagacgctgt tctgaacttc aatttttcca tctgtaaaac aggaataata aaaccaatca |
| 37801 | caaagggtta ctactatatt aactggatga aactatgtga aagcaggtag caaaatgaac |
| 37861 | agtgYttcta catacattat ctctgcagta aaactatgat gtgtaaactc agtaaagaaa |
| 37921 | aaaaagcatg agtgatcata aaagtctaat tattcattgt catcaaactt cagatttttg |
| 37981 | tgggagattg gaggactcta agggagacaa acaaatgtaa actgcagaat aatgagtttt |
| 38041 | aggccccgtc actgttacct caatttgaaa acctgctaat gaggaccaca ggaactcttc |
| 38101 | tgccagtgaa gctggtactt cctagaggaa aaatgcacaa aaaacaccta ccaccgaaaa |
| 38161 | caaaagcacc ctgaattatg attttcaaaa atatctagaa gtttatatat caattatWtt |
| 38221 | atctcatata aactgtgttt gattccaggc tagctttaaa tagactctat attttaatat |
| 38281 | ataactaaac aaatgcctcc agtgatagtt ctgaaacgtc attgtcctta aattttttgc |
| 38341 | taaggacatt gtccaagtgt ttgctactta gagactttca gaattttcat cgctacctca |
| 38401 | aagttcaagc ttttctgagg tcccagcgtt tgagcctctt gaacctggag gcaaggttag |
| 38461 | gggttgggaa agtaaacttg tcaagagact ctactgggca agccctcaca gcaaggagtt |
| 38521 | gggaagagag ctgacagcaa gctctggtgg ctcccacagc aatgtcttac gagggctcct |
| 38581 | tcggaggagt taataaataa taaagtttgg ttcaggactc caggcaagaa tgacaactct |
| 38641 | ggctgaggaa atttccaggg gctgatatct aaaataaact taaagtcaca ataaaatatg |
| 38701 | ataagtgcca tgtaataatc ctacaatgga aatacacagg atagcattgt ggttaagaac |
| 38761 | acagttccca cagtttcact tctggggtgg caaatgagga gttccatgga cccactcccc |
| 38821 | agcaaaataa gcagagatgt caaaaatgaa aaagaaatga acaaaaaaca acactaacaa |
| 38881 | aaaagtttac attctctgga aataattgca aatcatatat ctcataagtg atatttagca |
| 38941 | tatacaaaaa tattataact cagtatgaag aaatataaac aaaattaaaa aaaattaaaa |
| 39001 | tgggcaaaga tctgaacagt tctgcaatga agatatattt atataaatgg tcagtaagca |
| 39061 | aatgaagaga tgctcagcat agttttccat caaggaaatg caaatcaaaa ccacaatgag |
| 39121 | ctatgactac aagcccacta ggatggctat attcaaaatg acagataata acaaatgttg |
| 39181 | gcaaggatgt tgaaaaatca gaatgctgat acattgctgg taggaatgta aaatggtacg |
| 39241 | actccttcag aaaacagtct agcagttcct caaatggtta aaagtagagt cactacatga |
| 39301 | ttacaaattc cactgtatat ataatcccaa gagaaatgaa aacatatgtc catatgaaaa |
| 39361 | cttgtactca aatgYtcata gcagcatggt tgattgcagc caaaaatgga aacaacccaa |
| 39421 | aggtctatca actggtgaat ggatacataa aatgtagtat accataaaat ggaatattat |
| 39481 | ttggcaatag aatgaaatta catgttgata acagtgtgca gcatggatga accttgaaag |
| 39541 | catgctaagg gaaagaagYc agacacagag gatcatgtat tatatgaatt catttctgtg |
| 39601 | aaatgttcag aatagacaaa tctataggga ctcacagggg caaaaagtaa ttcgtgattg |
| 39661 | cctaggtctg ggaaagtttt ggagattggc agatgacagc taacaagagt ggcatttttg |
| 39721 | agggggagct ggtaataaag ttctaaaact gactgcaatg atgattgcac atatttgcga |
| 39781 | atatactaaa gctattggat tgtgcacttt ggatgggtga attgtatatt atRtaaatta |
| 39841 | tatctgaata aagctacttt ttaaaaaaga gagagtctgg ttccccagac tgcctatgtt |
| 39901 | taaatcccca cctctcctac ctgtgaatgt aggccaggta tttaaactct atgattctgt |
| 39961 | ttcttcatct gtacaatgga gataatataa attacctacc tcataaagct gttataaaaa |
| 40021 | ttcaaataac tagtacatgc aaagaacaaa gaccttctaa cagaacctgg cacatgaaaa |
| 40081 | gtgtgatatg tgtccattct tcttatgcac agactgttaa gggagagcat gaaaRaagta |
| 40141 | tccaacttat gggtaaggca gtcggcaagg cttaaaggat gatatttaaa ttcatcttga |
| 40201 | aagatgagca gggattatca aggaatagat aagagggaag ggatatccag cattagaaag |
| 40261 | agtatatgcg gaagtatgta gatatgatat tctatcaaga atttaaagta tcctaaaagt |
| 40321 | aaattcaaat attttctgaa gtatatgaaa ttgaaataca gaaaattcca gcaacctatg |
| 40381 | tgtcatgtct tctctttttt aagagttcct ttagagacaa ttcagtaaga aatttctctg |
| 40441 | tgactatgaa ggtaatattg tatgatgtaa ataatattca ccaagttaaa aataacattg |
| 40501 | ctacaactct gatccagtgt aaagtttagg taaaatagta ctcattttta ttattgaaac |
| 40561 | agtgtaatca gtagacatag ctctgtgttg tgtacatatt ttgttttgtc tcttcttctg |
| 40621 | agtgtactca tcttaggtga atggggaaaa tatgattttt ataaacagac tcttaaagaa |
| 40681 | aaatggccta tgcaaatgat gtaatttaga gcaaccatag tatatgtgtt cacttcagcg |
| 40741 | ctcactaaat aaaatcacca taagaattga tgcatgacaa tggcttgaca atttcttatt |
| 40801 | cttttgtatc acaccaattc ttgaaatgat agctgttgca cagacatgtg tgagtattgc |
| 40861 | tattgtatat gtggtagcca tgcatgaccc tacttttctc ctcttggaag ctggaacctg |
| 40921 | aattcttaga ctaatcaatg agtaaatatt tcagagatgt gttatctaat ttacttctga |
| 40981 | aaaacagatc tactacttgt ctctagacat ttagaaagag attgacagag tcatttgcaa |
| 41041 | attcaaagat ataaaaacag taggtagatt gacttccata atcaaatcaa tatttggtta |
| 41101 | gaacatttca caatattcta accgaaatta catgaactac attatatact ttcagaaatg |
| 41161 | cagtgtacca ctccatctga acaaaaacat aatgttaagg tgtccttgaa gctttaagtc |
| 41221 | atcttttggc aatgcagtag tttcaacata atcacaagac aaaaccagtt ccacataaaa |
| 41281 | ttcttcagaa atgaacatga atataaataa aaacttgaga gatgctactg aaatagattt |
| 41341 | tacatttcag agttacaaag gaacacatta gtagctatta aagcttacag ataacattac |
| 41401 | catctagctt actaataaat ctcattgtta gtattttctc tagtctttac tgaaccttta |
| 41461 | agattattaa tttttttcat attttattga tatggctagg atagagttat taaataactt |
| 41521 | cttcaagtta caaatatgct aaaaataagc attgaatcct tatctatcta atttactccc |
| 41581 | agccatgatg attctaacaa ggactggcct aatttcctgc cacaaaaggc tataaaactg |
| 41641 | agccaagtat ggaaaaacct tttcagacat tagtcaattg gtagaaatgg actttgaYac |
| 41701 | ctaaaaggtt ggaaacaact aaatgatccc aacaattatc ccagctttct tgctgctggc |
| 41761 | agtttccata ctggagacat gaaagtatgg atccaaaaca gaacttgtca gcctcactga |
| 41821 | gtttacgaag tagagatcag agggtgagaa agctgatgtg gttggcgcat attatctcat |
| 41881 | ttttgagata tgttgtaaat tagagggagc tgagcaggaa aatatttaca gaaatgtgaa |
| 41941 | tcttgcctga gtactagacc atcaatgcta gagagaaatt ctacaagtgt gggcaaagaa |
| 42001 | tgacaggaat cagaacaatc gccagagctc acacatgatt tttgagaaag gtttcatttg |
| 42061 | gggagatcgt attgtatcaa gaattcaaaa gaaaatgtag aaagtatgta tttatctttg |
| 42121 | agttgtgtag tgatcgatag aaatttaggt gaatatctaa atatctatat agatataaag |
| 42181 | taggatactc ccacacacct tgctatttct gtgttttaca tatttccctg acctcccaaa |
| 42241 | atgtccagYt ttttgttagg aagctgcacg ctcatcttcc ccttctgagc tccaagagca |
| 42301 | tgttgatgtt cttgctgttt catagctgat ataaattagc attgggtaaa cgacgaaaaa |
| 42361 | acgtcacaga aagtttttct tgttcacatt ttggaaatct tccttctcag tagagaaaag |
| 42421 | caaccttaaa gttgcaacat catgattgga tttcagttca caaaagaaaa taaattttga |
| 42481 | caaatcacat atgcttttcc tgtccctccc aaaatgctgc agtcttccat ggcagcctta |
| 42541 | ccaaagaaaa aactaagtcc ctaactggaa Sttggattct ttcaaaggca cagtaagagg |
| 42601 | ttttgaccaa tagagaagca ttgatcaaat cactatccac tgcattacat ggtactctag |
| 42661 | gagagtctga aatgagaata gatatcttca aaaagcatcc aaatctgggg ctggtttact |
| 42721 | catctgtcag cttctggaat agtgaacatg ctattaaaat tcagctcctt ctgggaggtg |
| 42781 | ggaagataat caaggggaga cccaccatac tgcatggaag tcccagaaat ggaaaagctg |
| 42841 | atcaaaggaa ggaaggtaat atactttttt ataatatgtt ccttgggatt tttaatgatc |
| 42901 | ggtcgaaata cagaggtttt ggttttaagg tgttattttc acagcatctc caggtaaact |
| 42961 | tccaagtatt atgttaRcct ggatagaaac aaaaaagtcc ataatgcttg aaactgaata |
| 43021 | tgtgatcctt gcatcatgtt taaaattgtt cagcaaggaa tttcagtttc tctaggtgat |
| 43081 | ggaagttagc acgagcaaag gaactttaca atttttcaga attttttttt tttcatgttt |
| 43141 | ggaaggtctc ctcctcctcc tcctccttct cctcctcctc ctcctcctcc tcctcctcct |
| 43201 | cgtcctcctc ctcctcctcc tcatcctcct cgtcctcctc ctcgtcctcc tcctcttcct |
| 43261 | cctcctcctt ctcctcctcc tcctcctcct ccacctcctg cttctccttc tcctccttct |
| 43321 | tcttcatttt tatttttaac cattgctagt ggtatgattt ttgaattggg aaaacaaaat |
| 43381 | attcagacta aatattttcc caatgattct tatgtagagt aatgtacttt gcaattcaat |
| 43441 | taaaaataac aagctaggat ggtgttctga gccaaatgta atctccaaga ccatggtcag |
| 43501 | taaagtactc aagaaaaaag tattgaggcc gagtagtctg aagtctaYtg gggaataaag |
| 43561 | aagcagctga ttagcatttg aaagcaaggt ctttcactgt tttaaaagtg aaggagaatt |
| 43621 | ttttaacaga Rcactcatca aaaacaaagc gtttgaaaat tacccctcct ttgttttatc |
| 43681 | agtctcaggg aagatgcact tcgaYacacg tctcaggaat taagatgcat ttcgatacat |
| 43741 | gtaatattac atttggtgac actgctggaa catatgctga gaaatgcaag aataaatagg |
| 43801 | actaatgctc attttcNttt tttttttaat cacttgcaag tgacatttgt ttcatctagg |
| 43861 | caggaaagca ggatcttata ggcagggtag gtgtaagggc tgattttagg tcaagctttt |
| 43921 | caatttatta tgcaataaaa tatagcaata aaaatatgca tctttatatt ttccagtaaa |
| 43981 | tbataggaat ctccgtttaa ttttttatat atgtgctaat aattaattca gtactacagt |
| 44041 | ctggatccac agtccttttg ataagagctg gcacagaggt catttttatg tgccttatta |
| 44101 | ttaatcttaa taatatgtag taatattcct ttatatgctt attgtgacac acagaaactt |
| 44161 | aaagcctttg tagctttaag ttcagatgtc tccacattct tttgtaaatc cctgcagatt |
| 44221 | tgtttcttgc ttttaaatat cagcaccttt ctgctgtcta ctcttaggtc tctgccctct |
| 44281 | atgcaggaga tcttttcttt taagtttccc accgtgcttc ataataaaat caaaagaaaa |
| 44341 | aggtacatcc ctcagaaagc attcatctca ctaKaaatag aaaacctgtc accttattct |
| 44401 | taaaacctta gatcagccag gccagtggct gaaatagtga gggtagtgtc tacaaagggt |
| 44461 | ataKagtagg ggtagcaaaa taattatgta ccttgttctc tccacatctt ttagggaaga |
| 44521 | gactctttgc tctggaaaat gacttaatac cattgggagg aaaacatttc ctctacccac |
| 44581 | ttaggttcct atgtttaggg gcctgtgaat taactgataa tagacagatt aacaggagaa |
| 44641 | aagaaaaggt taatctacac atgcatgtga agtcactcaa taatgagtcg tttcctgaat |
| 44701 | acccagaggt aaagattggt atagcaactt aaaaaaggga agggaagtgt ggctagggca |
| 44761 | tcaatgtgta gttgatctcc ttcctggRat tagcagaaag ctcttggagg agagttaata |
| 44821 | gcagctgtat tgggggtagt gtcagcttta gttaggtaag ggaaagtcag atcagatttc |
| 44881 | aaatattttc actttaatct ttatgctaaa actgtgattc cttcaatatg ctgatgaaag |
| 44941 | ttgaagtgtg gcttggaaaa aaagagaaag tataagtaga tttattctag atataaagca |
| 45001 | ttttttaggt atagtagaaa gagagaaaga gaaagcaaca ggcacacaca cactgagaga |
| 45061 | gagattttga cacgaccatg tcaaagacta agagtacccc aagttcttta tcaaccatgt |
| 45121 | agtttctgca acctgcagta tacacacatg catacccata tactgatgga ggcagtctaa |
| 45181 | attaatggtt aagaatatga acttcagcac cagagggcat tggattcaaa tttcaatctt |
| 45241 | tcttactagc tttgtaactt caaacttttt tcctcttgga agctggaaac tgcattttta |
| 45301 | gattaaacaa tgagtaaata tttcagagat gtgttataca gtttacttct gaaaacagat |
| 45361 | ttattacttg tctctagaag tttagagaga gatcgacaga gtcatttgca aattcaaaga |
| 45421 | tataaaaaac aggtagactg actaccataa tcaaatcaat attggtttag aaaatttcac |
| 45481 | aatattctaa ctcaagttat gtgaactata ttatatactt ttacattatt tatctaccct |
| 45541 | caagtttcag ttctctcctt tgcaaatgac aataacaata ccaaaaaata aaaaaactaa |
| 45601 | atgaggtaat gaacgtaaag tgataaggat gatgacaggc ataaagtaag ctttttattg |
| 45661 | tttttatttg ctttttcctg tagcctgaaa atatgttcaa ggtaaaaaaa agcattcttt |
| 45721 | tgctctgaat ctcctttatt ctaccaattc ttttctcgtg taagtgtctc agactcttca |
| 45781 | gttgtcttca ctttgtcatt tatttttatc ctcaaatcat tgatatttgg cttctatttt |
| 45841 | cacttctcca aacaaattgc ttttttgtct tcatgatctt ctacgtgaca aattaaatgc |
| 45901 | atgctttcag accttacctt cctggacctc tcacctccat tggaatccac tggcaattta |
| 45961 | ctcccagaag ccctgtcctc tcttgcatct tcaacatctt ctgattctga cctctctatt |
| 46021 | cctttgttta tttgtttgtt tgtttgagac agagtttcac tcttgttgcc ccaaatggag |
| 46081 | agcaatggca tgatctaggc tcactgcaac ctccatctcc tgggttcaag tgattctcct |
| 46141 | gcctcagtct cccaagtagc tgggattaca ggcatgcgcc aacatgcctg gctaattttg |
| 46201 | tatttttagt agagacaggg ttttgccatg ttggtcaggc tgatctcgaa ctcctgacct |
| 46261 | caggtgatcc tcccgccttg gcctcccaaa gtgctgggat aacaggcgtg agccacagtg |
| 46321 | cccggcctct ctattccttt tacctccttc attggattct cttcttccag agtttcatcc |
| 46381 | ctggccttca ctatacttta ttgaatgact tcatttactt tctagaaagt tataaacaaa |
| 46441 | tttttatttc caaccctagc ctctctctcc tgcttcagac tcattatcca cgagtactat |
| 46501 | tgaaaaaagt attctatatt taatgacaaa aaaacagaaa atatggaaaa caaaaattaa |
| 46561 | cagcaaaatc ataaataatt cttccatcaa aagttacttg ctaatatttt agtgtctacc |
| 46621 | actagctaaa cttaactaca tttccttatc tataaaattt gaggtaattg aggtcccaaa |
| 46681 | ctcataaaac tattgagcat gaatacacaa aaagttttta aagtacccag cacatactaa |
| 46741 | gttccatatg aatatttgct gctattattt ttttcaattt caaacatgta cacacatgtt |
| 46801 | tcaaattcaa aaatgtagct ttgtacattt tcttcccatt tagcaatatg caaatgagta |
| 46861 | tttttaattg aatagatttt tttttttttg agacggagtc ttactctatc actctgtcac |
| 46921 | ataggctgga gtgcaatgcc gtggtcctag ctcactgcaa cctccgcctc ccgggttcaa |
| 46981 | gcgattctcc cgcctcagcc tccagagtag ctgggactac aggtgcatgc cactacacct |
| 47041 | ggctaatttt tgtagtttta gtagagacga gtttcactat gttgtccagg ctggtcttga |
| 47101 | actcctgacc tcgtgatctg cctgcctcgg cctcccaaag tgctgggatt acaggcatga |
| 47161 | gccaccgtga ccagctgtga atagatattt ttaacagatg tgatcagtag attttttcag |
| 47221 | ccacttagtg aataatttct acagctgcct caaatgtcta ttaatttatc tagggttgta |
| 47281 | tgtaattccc agccttctaa ctgttgacag ttttatttct cattccctga actatgttga |
| 47341 | aatgcaaatt aatgtcttta cagagatatt tttgaatctc tctattaaaa aaaaaaaaag |
| 47401 | aaaaaagaaa aaaacaaacc aatcccgaac ttcaaaatgc tattcttggt tttttaaaaa |
| 47461 | atgacctata gtccaactct gtgtagataa ttatgtgaca gggcattgag acactgaagt |
| 47521 | tgacagccca atgtgctgtg ctgtgtcata cagatagact taaaaaaaaa aagccccagg |
| 47581 | ctgggttctg tggctcatgc ctataactcc agcatttggg gatcacttga ggtcaagact |
| 47641 | ttgagacaag cctgggcagc atagtaagac ccatcccccc cccccaaaaa aaaataccag |
| 47701 | gcataacagt gtgtgcctgt attcccagct actcaagagt ttgaagcagg attgcttgag |
| 47761 | cccaggaggt tgaggatgta atgagccgtg attgtgccat tgcacttcaa cctgggcaag |
| 47821 | ataacaagac cccatatctt aaagcaaaac aaaacccatc tctgattgta gcgtatttag |
| 47881 | gttgttttca acttcttcct agataacttg caatgaacgt tttaaaaata tatacttgtg |
| 47941 | cacatttatg ctcatttatg attatttaga tgtacaatta ttagatgaga taatataaaa |
| 48001 | aatttacagc ctttcacttt tatttttctt tttcttttat tttactttaa gttccaggat |
| 48061 | acatgtgtag aatgcgcagg tttgttacat aggtatacat gtgccatgtt agtttgctgc |
| 48121 | acctaccaac ccgtcatcta gggtttaagc accacatgca ttaggtattt gtcttaatgc |
| 48181 | tctccctccc cttgcctacc ccactaacag gccccagtgt gtgatgttcc cctccctgtg |
| 48241 | tccatgtgtt cccattgttc aactcccact tatgagtgag aacatgaagt gtttggttgt |
| 48301 | ctgttcattt gttagtttgc tgagaatgat ggcttccagc ttcatccatg tccctgcaaa |
| 48361 | ggacatgatc tcattctttg ctatggctgc acagtattcc acgatgtgta agtgccacat |
| 48421 | tttctttatt cagtatatca ttgatgggca tttgggttgg ttccaagtct ttgctattgt |
| 48481 | aaatagtgct gcagtaaaca tctgtgtgta tgtgtcttta tagtagaatg atttataatc |
| 48541 | ctatgggtaa atacccagta atgagattgc tgggtcaaat ggtatttctg gttctagatc |
| 48601 | cttgaggaat cgccacactg ccttccacaa tggttgaact aatttacact cccaccaaca |
| 48661 | gtgtaaaagc gttcctattt cttcacagcc ttgccagcat ctgctgtttc ccagcttttt |
| 48721 | agtaatcacc attctgactg gtgtgagata atatctcatt gtggttttga ttcgcattgc |
| 48781 | tctaatgatc agtgaatgtt gagcttcttt tcatatgttt attggtcaca tatatgtttt |
| 48841 | ctttatagaa gtgtctgttc atatcctttg cccacttttt tatggggttg aggctttcac |
| 48901 | ttttttattg tgaatttgtt ttctggaaaa cttttaccaa ttttaattca cataagtagt |
| 48961 | gYatgagaaa gtctactttc tcacatgctt gcKgataaat gttaacattc atttttatcc |
| 49021 | ttgccagtca gataagcaat aaattaaata gttcttgtta ttttaatttg tattccccaa |
| 49081 | aggtatgtta agagagcaaa acaataaatR attcaccctc aatggttgct gttaaacttt |
| 49141 | gtctttttaa aatttaagct ttaaagatta tgactttaat tattttttct tctcataaat |
| 49201 | aatatttctc ttctaaataa ttctaagtca caattatgta gggataaaaa agaaagtata |
| 49261 | cattttaatg ctttcctcca ttaaatttga atgtgtgtta attttgtatt cagtgctgca |
| 49321 | ggtttttaca gaatactgtc tttggttcca tattgaacat tcaccttgag gactttagtc |
| 49381 | tattgattga aagctttagt tcatctaata gaattattat gacacacact ccaRctaaaa |
| 49441 | atcagtcaag gacagtccca gaagttaata ctcttccaaa gactgatgcc tccactgagc |
| 49501 | acctctagga agtatgagat ggKgttgcat cacttctcac taagttctta taaccccaca |
| 49561 | tccaatatat caacaaattt catcagctct accttcaaaa attacctaga atccaattat |
| 49621 | gtcttattaa atccatttta ctgccaagtc acttctgatt tattgcaaaa ggctcctaat |
| 49681 | tgatctccca gcttcttcac ttgcctcttc cagtctattg tcaatagtaa ctgtcaactg |
| 49741 | tStagtaaac tgtgaaaata tatctgatca tgtctctcct ctgctcagag cccatctggc |
| 49801 | ttcctatctt agtcaaagta acagctgaca tcatcatagt ggcctaaaga ctctagtgaa |
| 49861 | gctctgcccc atccaaatac attgcctctc agatatttac taatatStgg ctctagcttc |
| 49921 | cttggtccta gccacgctag tgtctcttct gtctcttaaa caagtcagag actcttaact |
| 49981 | gctgtattta tacttactct ttcttctgtc tgaatgctgt ttctacaSag gtgctttcta |
| 50041 | attgaaggta caatcatttc tcacatatgc cttcttctca ttatttgtKt aatttctctt |
| 50101 | cacagcacct atcatcacca tctgacattt tatatatata tatatatata tttccttttt |
| 50161 | tgtttgttgt ctgtcactcc cactaaaatg taggtctaga agaatagaaa tgttcgtttg |
| 50221 | ttgtttgttt tgttcactgc tgtattctta gtgtgtgcct ggcattaaca ctcttttgaa |
| 50281 | tgactgaata aatatctgaa tttctgctat ttccctataa gtaatattat tttggataga |
| 50341 | aatgccacta atcctgaaac attttcaagt tttatatggt ttttatcttt aatatttgtg |
| 50401 | tggctttctg ctacattcca atatttaatt agctttagtt tacatttatt aaatgcttct |
| 50461 | atatccagat aatgtcatat cataagtttc agttgacatt tattaacatt actacttctt |
| 50521 | ataatatttt aacagaaata tgattcatca actccagtgt ttgtaaatat Oatcaccatt |
| 50581 | ctgaagtcaa atgttgccaa agtcttccat taaatacttg cagacttctc tcatttggta |
| 50641 | cagccagtca ctccttacag ctgcaatatg ttatatctcg aatgtatttc ttgatagctt |
| 50701 | tctttaagat aactgcactt gcaaagttct ttgtacctag aaaactttca acaaatattt |
| 50761 | agagaatata atttactcat gcatgtggat agacacatgt aagattcact taagtgtcaa |
| 50821 | atttactaat ataatgaaaa cttggaccaa acaagcaaca aaaaatatta tccagcactc |
| 50881 | atactcaaaa cgcagtctga gagtttggta tttttcagtt cctaaaggtt gatcatgtgg |
| 50941 | ttcataaaat cttagtctcc aaaatgtatt ttcaaatgaa tgtcaggcag aaccaacaaa |
| 51001 | tgagaactag ggtacttagg attattgtaa ttgcctaatg tgtttggtga ccttgtattc |
| 51061 | ccacttacag caacttatgc ttctttcaaa ttcttttgta caaaaaaaat tgtcttgtcc |
| 51121 | actctccact tagcctttaa gtcactaaga tgtggctatt tcattagttg aaagcaatgt |
| 51181 | ctaaaataaa atattttatt ttaaaaatca atcatcttgc ataataatag ctttaacttt |
| 51241 | atgctcaatt taaaatattt gtatttaaat aattgcttac agaatagaaa tagaaatgat |
| 51301 | atataagata atatagaaga tgtaaggatt taagaagtta ggatgacagt atttttattt |
| 51361 | acttttatca tttgtaattg tatcttattg tctggtaaaa acatttaagg aaagattaaa |
| 51421 | atctaagttt aatgtattat ttataaacat ttgctccttc ataaaatctt cctgcaatcc |
| 51481 | ctctttttaa aaatgttttc attgcatatc ccgatgatct gcttttcttc tctccatgaa |
| 51541 | actcagatac tagttttctt tacaacacct ggattgtttc ttcctctMct gctgttcctt |
| 51601 | attttgtttt tctattctgg tgtcttgata tctcctttta acaaattcca taccattggc |
| 51661 | cttcctaact tgtgaacatt tctaatactc acatatgctc tataaaaaaa agtgaggttt |
| 51721 | ttccaagaag aacagtggcc attaattctg catatatcaa aatggaatgt gtcatctttg |
| 51781 | agaaaaatat aagctcacac catgcataaa gacaactatt gtttgcttca gccaggagta |
| 51841 | tgttttaggg aaaaaatatt ttaaacaagc cattaagaaa tagtctcttt tttctttaat |
| 51901 | gtctttgagc tacatatgtg agcagaatta taaagaattt ccagtgactc attcttagtt |
| 51961 | ttggccttcc tggcattctg tagtcgtgca tattaaaacc tctaaacagc tctcagtaaa |
| 52021 | gccttggcag tagagcttgt agcttgtacc tatcaaaaat gtcagatgct tttttccaac |
| 52081 | gccatcacta gcaaacaata ttacttagtt attaacatat aggaattaac ggcaaaatct |
| 52141 | gcaagttgca aacagtgttg taaatcaact aagcatttat catgagattt tttaagtgac |
| 52201 | tgaatacaga ttcagaatca tgaagttatt atctaataac ccaacaagtg atgtgaataa |
| 52261 | atccttgcta atatgaaaat tatcagccac tgaaacaccc ttttctacaa gcaggtctgt |
| 52321 | ggatcctcat gctaatgtac ttagattgat aaaccacaga cattctctga aagcttcgtt |
| 52381 | tgttccagtt gctgaggctt gtgcttagag catctgtcat gcaaatgatc agcaaatcat |
| 52441 | aacctgtaat ttgttttcat ttaataggca gacaggtttt caccaattta gactcaagtc |
| 52501 | ctattaatac tctttgaaac taattgctgg aaaatgaatt ttaatgacag gattttatca |
| 52561 | tttattattt tcccttctgt ccctataaag gaagactcaa agccatctac tcacactttg |
| 52621 | aaaatatatg ttaaataggc acaagccata atctcctgtc atctgggctg ttgcaaagga |
| 52681 | cccctaatcc cctctcttgt aataatccat tctacactct actcttaaaa ttactttctt |
| 52741 | actatcccat ttcccttcca caaaatcttc aattccctgt caagtaaata gcagacactt |
| 52801 | taatatggct tcgttgccct ccattatctg tttgcagttt acatattttt atccttattt |
| 52861 | gatatcgcaa tataacatgt atacagaaaa aagcatgaMa cattaattaa taagtagtaa |
| 52921 | agtaacatcc agaaaacact actcagagca aaaagcagac gattgtcatt accacagaaa |
| 52981 | ccacctcccc agtgcatctt tctgatcaga cccttcccag catcccagag tctaaccacc |
| 53041 | cagagataat cacttcctct attttcttta gattgtctcc agctacgtgt gaattcttaa |
| 53101 | ataatatggt caatttaccc atttttgaat gttatgtaaa tggaatcaaa atctgctttc |
| 53161 | tttggctatt gcttttttca ctcaaattat tctcttaaac attcattcat tttagggtac |
| 53221 | agcttcagtt aacttcaatt ttaagctgtt tagtattcca ctgcatcaat gtaccacaat |
| 53281 | atatttatct tttccatgtt gatgggcact tggattttta gattgtttcc acatttgagc |
| 53341 | tattacagac aagggtgcta tgagcattct tggatgtata gtttggtgcc cagtattctt |
| 53401 | ttgtattcat acctaaggag tggaatttct aggacttagc catgcatatt catactagat |
| 53461 | aaatattgat gtaatacgta aaaccaagta atattaactt gtatataagt agctctgtat |
| 53521 | gctactagac aagtcaaaat atttttcaaa atggttgtaa atttatatat cgagcaggag |
| 53581 | tgaatgctat tcactcctac ttctatttcg acttctagaa ataggagcac ttctatttct |
| 53641 | ttatatgctt gacagtactt gggattatca gactacctca ctttctgttc ctcctctatt |
| 53701 | tattcttgct ttaggatttt ctatcctctt gtttattctt ccttcaccct ggatattaat |
| 53761 | tctgacctat tgcaattcat gaattctttc ttcatctgtt tctaatctat taatgactca |
| 53821 | gtcatatgtt aactttggta attgtctttt ctaattctca aatttgttta gttctttttc |
| 53881 | aactgcgtaa caacactcct ttgtagtttc cagtttcctg ccaattaaaa aagcattgcc |
| 53941 | cttcatttct tcaaacacaa taaacataat atttccaata tgcatctgaa aattctagta |
| 54001 | tctaaattct tgaggatcaa tttctgttcc ttgtttcttc tgcaggttct attattgaag |
| 54061 | aattattatg ttggtgcaaa agtaactKag gtttctacca ttacttttaa tggcaaacac |
| 54121 | cacaattact tttacactaa tctaatattt cttttcacca catttctttg atttttgttt |
| 54181 | ggacatcata ttcaaaaatt atttgaagga atcatgttac acctaaagta atattacctt |
| 54241 | tttctagaga ggattgtgtt tttctctgtc aggaatctgg agcctccatc agggtaccac |
| 54301 | cataaattgt gttaaaattt gagattaaac tatgcagtcc tggattttaa tccataggtg |
| 54361 | gaaaaaaata gagtttcaaa gaggtaagct tcaattaaga cagattatga tgcctccctc |
| 54421 | ttctgtaaca tattgtgtga ctttgagttg agattcttcc taagttttct gatctattaa |
| 54481 | aaaagatata gctggtaatc cccaaaatca tgattttcct tttttttttt tttttttttt |
| 54541 | tacagtttct actgtatttc tttgttgtcc tgtcagtacc agttatggtg tgtgttgctt |
| 54601 | tttctttctt tatatttttg ttgagcacag tgattgagta catgccccac taatagggta |
| 54661 | taattatttt gagagtaata tctatgactt aacaccatat ctctcactat attgagtgta |
| 54721 | gtaccttgat gcagtagcta gctgctcagt gaatgttaaa tggataaatc aatgactgaa |
| 54781 | taaattttag agataggtac atagataaaa gtgatcaaaa caagctaagt attactgcag |
| 54841 | agaaggaaca agtatctttt ctattatagt tcccaaagct tcaaccaaat ttcttttgct |
| 54901 | atgtttacct gtccaatata ttggctggtt gtactcatag agtactagtc ttagttagaa |
| 54961 | tttatgagta atggtccaaa tccgtaatag agcttaaaac taaagcttta aaaacattga |
| 55021 | tccagatgaa gaatgatagg atgcaatgaa agtttattta gggcataaaa tttaaaaggt |
| 55081 | atgttatcaa taattcattt tgaaagtccc cttaatatag ccatttctat tctgtatctt |
| 55141 | taaccagtta taggtgacat tgctaggaac agattttgac agcagacttg tgcaagggat |
| 55201 | ctgtttgcct agagatttac ttaaaaggta gaattaaagt catttcaaga aagaaattta |
| 55261 | acataagaaa atataaccat ttagtacact aaataattgg tctagctagt tatgagttaa |
| 55321 | aaatgaaaaa gaattaatag tttttagcaa catatacatt gggacagtat ttttgccaca |
| 55381 | tctatcattt acctatgcaa taattaaatt cataattttt taagtgtcat atcgaagagt |
| 55441 | gttattcaac ttcctggtga ttaaattact gataaacata gccgattttt tttggttttg |
| 55501 | caggtcctga aaaatagaga atgcatatga cttccaaata ttggtagaag agccagtcaa |
| 55561 | ataatatctt ccatgaatcc tcttacaatt aatttgctga ttgatagatg ttcaaaatct |
| 55621 | agaaatgaat gagttgcatg taaggaaatc agtacatgct tctgctgcca tcatatatca |
| 55681 | caatacaagc attaaaagct atattaatta tagaacttta tgatcttatt tacatggtct |
| 55741 | gtgaatttga tctttatttt ggaattcctt taatccattc tgattctaat cacctcagga |
| 55801 | ccaactttag tgtatttgta caaggcgtaa tcattggcta gctctataag ttgtccaaac |
| 55861 | aaccaaatga gatgtcgcaa attctgccaa ttgtgtaaag ttttattatg tactttaaat |
| 55921 | atatgaatat ttggaatatc aagatgtgtt gtattttacc aataatatta aaggtttgct |
| 55981 | tgttcacttt tcacttgtat tatgatgtca tttaaacaag tcagtattat tagaaatctg |
| 56041 | attcattctg aaaacctctc atctactgat ctaatgatct tcaatattca ttaacatgaa |
| 56101 | atattactat aataggaaaa aaatcggtac cttaacaaaa aatatggaaa tttatttgtt |
| 56161 | tatttattat ttttacttat ttatttattt atttatttat ttatttattt atgtttttga |
| 56221 | gacagtctca ctctgttgcc caggctggag tgcaatggtg tgatcttggc tcactgcaag |
| 56281 | ctctgcctcc caggttcacg ccattctccg gctgcagcct cccaagtagc tgggactaca |
| 56341 | ggcgcctgcc accacaccca gctacttttt tgtattttta gtagagacgg ggtttcacca |
| 56401 | tgttagccag gatggtctca atctcctgac ctcgtgatcc gcccacttcg gtctcccaaa |
| 56461 | gtgctgggat atttctttct ttctttctta cattctagag ccttggcgag ttggcccaag |
| 56521 | tgttgtacag cattttcRgt gtcagggaca tagacttctc tcctttctct gctgtgtgta |
| 56581 | gtctcagata gttaccagag caccagccat tgtatgttct ttctagtttt caggtagcag |
| 56641 | aaagaataag aaatgttgca caaaccaccc tgtttacatc acgttggcca gaattagtca |
| 56701 | catggccatg aagcaagcca ctttgcctga agtaggacta cagattgtct ttattctcca |
| 56761 | tagtggtaaa atataaaaaa atataattag agaagaagag aactcctctg gaggacaact |
| 56821 | agcagtaacc tactctacta actgtccatt tactagttca ttttgctcta agataacata |
| 56881 | taaacagtga aactaaaata tgttttcaaa attagaaaat gtaagtacct tagataacca |
| 56941 | agattaaaga aatgttacaa ataccacaat atcaacatag ttatagatga acatcaaact |
| 57001 | tagtactgat tttctgaata tccaaaatga aaagaaatac ctcaataatt ggttacattg |
| 57061 | ttttttatca ttttgaaaaa ggcactactg aggcaaatga agctctttga ccctgaacaa |
| 57121 | ttacaaaatt tatctcatag caatttttag ggagaaaatt gtatattata gttgacaata |
| 57181 | ttcctataac aggtgcagtg attttataag ctacttacag tgtctttgaa taaaagccaa |
| 57241 | aatgaaagca ttatgaaggc tattttgtga atctctgagg aaaaatcatt caaaaaaaaa |
| 57301 | aaaaaacctt tggctattct ggcttatata caaggagaaa ttttagcctg cccagagggc |
| 57361 | tggatggact acatacacca tgaatggtta tctgtaaata ttactgttgc tgaaagattt |
| 57421 | ctgaacaaat gtagaaaatt aaggaataga ttatctagtt ttctgtagtc tgccagcatg |
| 57481 | tttcaaatca atcgagcttt cttaacacca ggtgttctca gaagtgaaag gggcctattt |
| 57541 | gttagcttta aaaagacaaa aatgggaaaa gataaaagag gtggaagcag aaaccaattt |
| 57601 | gctaaattta ctaaattaga cagtttattg aaaaggtaag tgaatttctc atatcagtca |
| 57661 | taaagaagct atttttccaa tgaaatgtgt gtttatatca aagtcacaaa attacttagt |
| 57721 | gaataactcc cagtaaatgc gatattatta atttcagcta aattatatgt tcttagaatt |
| 57781 | tttttatctt ttcagattgt tttatgtaga ttatagctgt taaaatttta ttggatgtaa |
| 57841 | tttacatggt ttacaaacaa taaattcctg agaatagata cgataaattt atagtttgtt |
| 57901 | gaatgattta ttattaagga gtctcagatt ggtcctccga ggacaggaaa aataaattca |
| 57961 | tggaccctaa gttttttagt tacttttatc taatttttga tatggtaata attaaaaggg |
| 58021 | agatgataag aaattgaatg attaagcatt gttaaataat atgatgcgtt aataatgcat |
| 58081 | aagttatatt cctgagttga ttctttcaaa gtataaaaca atttttagat ttaatcaaaa |
| 58141 | ctctttaaag aattaatctt tgcttttagg gagcactata gattgacatc agaaatttct |
| 58201 | cttatttcca tgtaggaaga accttttgtg atggtctctg aaaatgtctt gggtaagccg |
| 58261 | aagaaatacc agggcttctc cattgatgtt ttggatgcct tatctaacta cctgggtttt |
| 58321 | aactacgaaa tttacgtagc accggatcac aaatacggaa gcccacaaga agatgggaca |
| 58381 | tggaatggct tggtaggaga acttgtcttt aaggtaagaa ttactttatt tatttgtctc |
| 58441 | atacttaaag gttcaattat ttgtctcata cctaaaggtt caacagtaac accttgaagc |
| 58501 | tgatttcata taaaataagt gtgatgtatt taggttggtt aagcattagg tggtggaatt |
| 58561 | gagtacaaaa gtctcactca atactatttt atgaactttg tggaaagaaa agtagttgac |
| 58621 | aaaataaacc taaatgttaa aatatatcct gtaatagaaa agggtttaga agaagacctt |
| 58681 | ttctttgctc aacttatacc ccaaaaacag aaagtgtata tgatacgtga tgaaatcaca |
| 58801 | tttttttttt gagacagagt ctcactctgt cctccaggct ggagtgcagt ggctggatct |
| 58861 | cggctcactg caagctccgc ctcctaggtt cgcgccattc tcctgcctca gcctcccgag |
| 58921 | tagctggact acaggcgccc gcccccacgc ccagctaatt tttttgtatt tttagtagag |
| 58981 | acggggtttc accatgttag ccaggatgga ctattgtttt ctttttaaaa atgtgatgtt |
| 59041 | attggaaaaa attaaaacat tcactgctta Raaactaatc atttcattct gtaatctaat |
| 59101 | caagataggK atgtacatat gtatatattt ttctttgttc tttcaattct cagaaaggtg |
| 59161 | tttaaaacct ctatgtcYtt ctttagtcct gtcagaatct gcttcagttt tttgaggctc |
| 59221 | tgttattagg cacatagaca tttataatta ttacattttc ctgataaatt attgaatagt |
| 59281 | tgggtttagg tttataactt actgtttggt ttatatgtat accatttttt tctctgttgc |
| 59341 | ttcttttcct gtttttcttg gggttaatta aatatatttc agtatttgat tttattgctc |
| 59401 | ttactgcctt tttagttgtc tccctttgta tttttgttcg tggttagtct aaaggtcata |
| 59461 | atatgccttc ttaacttact acattctatc ttaagttaat attgtactac ttcacataaa |
| 59521 | aagtaataaa ttttcagcaa tataatttta tttgtactca ctcctttttg atattgtgtt |
| 59581 | cacatattta tattttatta acctcatacc aaatatcata gttttttatt taaatattta |
| 59641 | ttgtctttta aaggtacaga aagaaaaaaa aaaagacagt tgctgggata taatcactta |
| 59701 | tctaccgtgt ctggggctct ttattcctta catatatttg agctcccatt tggtataatt |
| 59761 | taccttcaac ctgaagaact ttctttagag tgtcttgaag tgcagggcta cgtaggtagc |
| 59821 | atatactctc aacttttgtt taccttgaaa tgtctttttt aaccctcatt tcaaaatgat |
| 59881 | attcttactg gatatcaaac tctgaattta cagggttttt taatgttcat cattttaaag |
| 59941 | ttgtgattct atcagttttg ccatatatta tttctgatga gaaattagcc atcatctgta |
| 60001 | tcctgattct ttatatgtag tatatttttg tatgtgttag tggccattct acaagtttct |
| 60061 | cttcattttt tggtgtttag aaatttaatt atgatgttct agatatgatt ttctttgcat |
| 60121 | ttattgtgct gagagttcac taaacttctg ggataggtta catttagtaa atatagagaa |
| 60181 | ttatttcttc aatttttttt accttctttc ctttctcttc ttgatttgag gctcagagaa |
| 60241 | tattcaagtt agatcactta atgttgtctc ctaagtcact gaggccttgc ttgttttatt |
| 60301 | aagatatttt tactccctga ccttcagatt tgacaatttg tcttgatctg ccttcaagtt |
| 60361 | tactgatatt ctgccacctt caaatttttg ttaagtcctt tcagtagctt tttcattcta |
| 60421 | gattgcttat tttttctttc cagaatttca attttttgaa ataattttta cttttctgct |
| 60481 | gagatttcct atctttttat cagttatgac tttcttttct taaaagttca tgatcacatt |
| 60541 | tataatggct tctttaaagt ccttgtttgc taaaatttca acatcttatc atctcagaat |
| 60601 | acattgcatt ttcctggttc ctcacatttc tggttacatt tgattatata ttggacttcg |
| 60661 | tggttgatac attgttaaga cttgggatta tgtctctgaa attgtatatt ctgaaaagga |
| 60721 | ttgatttttg cttcagtgga tagttaaatc actatctgtt ctcttgaatt tgtggagatt |
| 60781 | tagctttaaa cattgttaag gcaggtctat ttgatgtaat cttggtccct agggcaaatc |
| 60841 | ccttggtttt cgtagtccac atatttctaa gatataacct tctggagttt ctggggaaag |
| 60901 | cctgtggttc tcctcaagcc cttctgactt aaaggaactc aaaattcaat ctgtatcttc |
| 60961 | cctgtcatag gcaacagttg taatcccctc tttagcacgt ttagccttct agccattact |
| 61021 | ctttgctaat tttcctagga tctctcccat atatgtgcag tttaggggtc agctaaggat |
| 61081 | tttagaRagt ttatacacag attttggggc tcactcctct gtggcatcct ccttcttgtg |
| 61141 | tttccctttt caatttctgg caaccctagc tgattcaaac tccatcctct gacaagttag |
| 61201 | ttaataagac tgactttcta cttgagctct gtcgacccca tccccgctga actgaagtgg |
| 61261 | gtcctcaatg actaagccta ataaaggagg gctctacccS gtgcagttat tattttcaag |
| 61321 | ggtaccctgc agtttctgcc tgctttgggt tgctctccag tcttttctat atattttttt |
| 61381 | caatttgatc ctgaattttt aatttttatt ctgatagggc tagtccaata aaagctagta |
| 61441 | catcattgct agaattggaa taatttctca aatgctttaa agtactcaga aggctagagg |
| 61501 | atctaaccta aattgtttgt aaggaatgga gaagagtaga aataaaaggt ttcttaaggc |
| 61561 | agtggtaggg aaaataataa agctatttct atattctata aaatcctaat gaatttggtc |
| 61621 | tatttaatac ataagttaca tatagaattg tattggaaag cattaatatc gttattttta |
| 61681 | atacaaaatg ggcaatcgtc agtcctcttc cttcttatta aaaccgtgcc ccttcatctt |
| 61741 | ctattctttt aaaagtcaca aattcagtgt tccaccttta tctttctaag ggctgtttcc |
| 61801 | tgatctgaac ccagattagc aattacgtta aaattagtgt aaagaaaagg cattatacaa |
| 61861 | atttattcta tatagatagt ggttaaaatc cttaatgagt tattatgcta ataaactaca |
| 61921 | cttgctagat gcaaattaaa cataaaaagc attcaaatta gtatgttgat gttgttttta |
| 61981 | atttgtttta tgtgcttaca ctagttagtt taattttgga gacttacttt ttcacctata |
| 62041 | aaaatgagga gtccaagtat gttaatggta agatcacttc caaatactat gttttgaaaa |
| 62101 | tataagttta tcgtatagca atcatacaca agaaatagaa tgttcttcat aaacaatcaa |
| 62161 | tttcaatgta Ytatttgcat gtaagagcat gtcattattg tatgataatt tatagtttag |
| 62221 | agggagtcct tttgcaaata aaaaattgag gcttaaagaa gcagacatat gatttttaga |
| 62281 | cagaaaaaat ataaaattat tcattggaac taggttttta ttttgttcaa ccggatattt |
| 62341 | agtcactctg actaggcttc aggaaaacta ttaagcaggt ggaggagaag aaacctacaa |
| 62401 | aaaagactta gttggagtag atagagagat taaaagaaaa ttgagaaaat gggttgtcat |
| 62461 | gaatgccaac agaaaataac atttcaagaa ggaaagagca gtcaacatta gaaaatgact |
| 62521 | atcaagttaa gggtacacaa cattccctta actgtattct gactgttatc agtagagatg |
| 62581 | taagttataa tttttaacaa ttacaaatgt taattcaatt acataatgat actttaataa |
| 62641 | aataccataa aataatttag ctttccaaga aaattcatca tattcaaact ttatgaggtg |
| 62701 | tatttacccc tataaaccaa aattacaccg ttgaaatggc ataaaaatgt tatgatggag |
| 62761 | ctccagaaaa gcaagcttat taWtgttatt atatcttctg ataatataca tacttttgtg |
| 62821 | aatctaagta tattttaaat aaatgttgcc actaaatatc tctgtacaag acagtaagaa |
| 62881 | ttttaaaatt aacaggatta actcgtgtgc ctttctaagg ggctaccaaa cttaaaagaa |
| 62941 | tgtttcacat agtgcaatta tatatatcat aatgattatg caYgtaccat cacattaaag |
| 63001 | aagagtcaaa gaagaaatgt tggaaagtga gctctgaatt catatgatta ttccacagtg |
| 63061 | attagatctc atgttagaga gctttctcat taaaaccaga agtcagtggt ccagtacata |
| 63121 | catactttta agagaggaaa atgcagtcag agagagagag aaaatgattg atatgatgta |
| 63181 | catatggagt ctatttaaaa actaataata tagtaaagtc tcctcaagtc cttctctgcc |
| 63241 | tcactactct tataattttc tgcaattaat gtgttcttaa aatttatgaa aacacaaatc |
| 63301 | tggccaaaag atatgaaaca gataaatgag agatatcttc tgcctagtac aggagaaata |
| 63361 | tttaagggtg agttaatgta actgagaaat tattttctcc tagtttagaa gggaagagag |
| 63421 | gcccacagag aactttcaat aagaaataaa aagtatatca agtttaggat agaagtacca |
| 63481 | aaaaaattaa aaacaaagat aactctgaat tagatacagt tggatgtttg atgatatagt |
| 63541 | ttcttctttg gctggctttc aagtcagaag cttttaaagt ggagtattta ggggtattag |
| 63601 | aagactttcc aagggcaagc cagtatattc agcacagaaa aatttcaagg tgttgagtga |
| 63661 | cattttgaaa tagaaactaa aaacttcctt tttcatatat taatttgttt ggaaaagatt |
| 63721 | tctataaagt aaaaaaatac agaaattaaa tcttaatgct aaactctacc tcatttaaac |
| 63781 | cataattagt actgacccat ggatatctaa attatttttt taaaaggctc tatccataac |
| 63841 | attgtaagct gcatttgtag taaaacttca tttttataga cactgaatcc atagatcgta |
| 63901 | tactaatYga atcatgactc aattcagaaa aaaagatttt atacctaaaa ctttatagtc |
| 63961 | actggttatt taaaaaggat tgtaatttta atttgtatgc atatttttga tgcaaaaata |
| 64021 | ctttggtgat caagaaaaga ctttcaaaca cacatttcta ttgtacttga attacaattg |
| 64081 | tgtgaggKtg gggcggaata taaatatagt tcaagcataa aataaaatga tataaatatt |
| 64141 | ctacctatta aagcatgagg tcaaatcact atgatattta gattctaaca gatatatttt |
| 64201 | taaaagtgac ttgacaatat tattttaagt tatcaatatt tacaacacaa tatacatatg |
| 64261 | tcagtgccga cgcccactca ggaaaatgaa aaccattcct aaaattttga aaagaggaga |
| 64321 | atttaatatt gtgggttgat cacaaaggcg ctagaaggaa tcaaagagca aaggatgaac |
| 64381 | agagtaggac attggaaaag caaaaagaaa aagtaaaaca cagatatcaa gtgttactga |
| 64441 | tgtgtcagtt gattgtatct gccagacgta tgccccttga tcagacctgg aattgccaaa |
| 64501 | aagttgctgc ccgtgcccta gctgctggga tcaagaatcg cctactgcca ctgctgctgc |
| 64561 | agccactgaa ataaccattt aaagcagacg gctcttctct ttctttttct gtctgatatc |
| 64621 | ttcagtggtt tccctcaggt ggaaattatg gagaagccag atggcaaagg agcctgggaa |
| 64681 | atctggtttg cagattccca tccctataag gctcacagta tatagcagag tagaaaatgg |
| 64741 | tatgtatagg tttaagagaa aacaggtaat gatcagtact gtctgcaaat tgcgcccttt |
| 64801 | acaattttct aaatgattgc aaaattaata tgtcaattat aaatgtagaa agatacatac |
| 64861 | ttaaaaaatt cctttggggt ttatatgaag aaaaaagctt gatggttatt acaatggaag |
| 64921 | atttatttta tataaagaac Wtgactggtc gttttggatt taaaaataat ctgttccttc |
| 64981 | agcctaattt tacctgagcg tttccaccac ctggaaatta aatctcttca tgctaactga |
| 65041 | ttatcaaatR ctaaattata tgacaagaat tttactcccc aaggaaaata gatccaaaaa |
| 65101 | tggaagaaag ccagaaccca ggaaaatgga aaaaaaggag gaataagtgg actaaattat |
| 65161 | aaatctgtaa aattaggata aagtactata cttagcatgt aagtattaat agtgatgttt |
| 65221 | ccatgttaaa atatagcacc attgagagtc ctatctctca atttctaaac ttctagtata |
| 65281 | acactaggct tttcttgtca ctgtgcccac ccacgtggtt tcatgagagt aaagaatgtt |
| 65341 | tttgaaagta gacatataat attggagtat aataagatac tatttagtaa ttataatgcc |
| 65401 | aataatgtca ttttctgaga aagaaaatgc tcccaagact aaacagagta aatcagctgc |
| 65461 | ttgggactac acagctttcc taatttttat ggttgacaca aagtttggca attctttagt |
| 65521 | tttactaggt aaatgaattc ctatgatggg tattttagtt catcaatgca ttaacaatag |
| 65581 | aaagcatata tttaccggga ggctttataa atattttatt ttattatttt atttatttat |
| 65641 | ttagagatgg agtcccactc tgttgcccag gctggagttc agtggcgcaa tctcggcttg |
| 65701 | ctgcaacctc cgcctcctgg gttcaagcga ctctcctgcc tcagcctccc aagtagctgt |
| 65761 | gattacacgc acccaccacc atacccggct aatttttgta tttttagtag agacagagtt |
| 65821 | tcgccatgtt ggccaggatg gtcctgaact cctgacctca ggtgatctgc ccgcctcagc |
| 65881 | atcctaaact gctagaatta ctggcatgag ccactgcgcc ctgcctataa atatttcaaa |
| 65941 | acatatgcca cttaacatgt gttaatcaca tgccatggtc aaagtgctat ggagggatgc |
| 66001 | aagtgtgaat aagacataga cattgatcat gaaaacattt tgttgatggt ctctatgtgc |
| 66061 | tatgcactgt gctaggcact ggagatacaa agataaataa aacatggttc ttgcccttga |
| 66121 | agagatcttg tcttaatgag aaacacagag gttaaactag acacttataa tacaatgcac |
| 66181 | taggtgcaat gatagagaag cactaagaaa gcaacaagga aggtagagta aaggtaaatt |
| 66241 | tcctgaagga ggagaaatat agcctgatga caaaataaca ggtagtaatt atctaggtaa |
| 66301 | agagggattg gcagaaagtg aaggacgtct actgacagac acaagagtag aagtaaaggt |
| 66361 | agaaaggtta gaaacagcat ggaaagcagg ccaaaattta tgagaatttt gcagctctcc |
| 66421 | aagcaaaaag tgatgagaat ctatcctacc atactaatgt tgtgaagaga atgaaagaca |
| 66481 | ggaaatcaga gataaaaagg aggtaggata aacagaattt attggctaaa gtgaggagaa |
| 66541 | gggagaagtc tggaataatt catcagttca tagtacaaat acataaaagg gtggttgtgt |
| 66601 | aactaattgg gacagagatt gctgaaaaag atttagagga ggaggacagt ttagaatagg |
| 66661 | gtgagttgga tatgtagcat tctgaagctc actgtgaaag tgccatagga ggtatacatt |
| 66721 | tgggagtcag caacctgtgg gtggtagttg aaatcatgaa agtacatcag attgccaaaa |
| 66781 | agaacacatg gagtaagagg atcactgggc taatcttagg atgaaaccca gagaaagctg |
| 66841 | tcacttaaga attgacaaaa taagaagaat ttatgaaaaa aaataagaaa gtttcaaaaa |
| 66901 | ataagctatg actagcaatg tcagaactat ttgagatgtt gatgataaga actgccaaat |
| 66961 | gttcactaga ttggccattt gggagttgtt ggttacccaa gccagaactc ttttggtagc |
| 67021 | atagtgggag aaaaagccag actgcaaaag atgatggaaa aacttggatg tgaaaaggtg |
| 67081 | aaaatgacat gcatatgtat tattttttca gaaattttag atggagaggg gaagaaagag |
| 67141 | ataataattg gaagggtcat tggttttggt agagtttttg tttgttttta agttaaaaca |
| 67201 | gagacttgag taaaattata agctaaggaa gaaaaagaaa gaaggaaaat gtaatataag |
| 67261 | aaagtcagtt aatatgtgaa ggataaatat cctggaacag attcaactcc atcaaaaatg |
| 67321 | attaaactga aaattgattt taatgaggta aagatgttac tttgatactg aatataatat |
| 67381 | aatgagaatg tgtatgttaa taatagatag gcaagagaat ggaaaattga caaagatact |
| 67441 | ttcttattcc ttcaaattta ttgataaaaa ttggagatta cgtatgttga cagtgatggg |
| 67501 | gacatgtatt atgtaacagt ctacaggaga gtggtgaaga ttgaaataga cattgaggaa |
| 67561 | agggaaagtg actgctaaat cagaacagat aaaagaatag atcagtggca ctaaagactg |
| 67621 | agtggaggtt tatatgaaac tgacactttt ttattgctgc tagtttacac aacagtgtga |
| 67681 | ctttcttcag ctgagattga gtgcccaagt ctaggagcag agatgaaaat gttcatatca |
| 67741 | aggttgagac atggtggata aacttggtaa gggaattaaa tgagatgaaa gaagagctaa |
| 67801 | aatgattaag gaagcatagc catgatcaga gacataaact tggataaaat tttggaaatg |
| 67861 | ttaattagaa gatcaaatga agttgaaaaa caggtgaagt atgagtgaag aaatgaaaga |
| 67921 | gtaggttaga aagacataac cagagactga aatacgaaag ttctagaatt tgaccttgag |
| 67981 | gttcatggca gagtgttaga gaaaacaaaa gaaatgagtt taaaatagct caaaatggag |
| 68041 | tgagggaggg agggatgaat agatgaagca taggggattt tcagggcaat aaaactattt |
| 68101 | tggatgatac tctaatgatg gatacactgc tgacattata cacttgtcaa aacccataga |
| 68161 | aagaatgaac tctaatgtaa actgtacacc ctagttaata atcatgtatt gatattggtt |
| 68221 | cattggccag gcaaggtggc tcatgcctgt aatcccaaca ctttgggagg ccaagatggg |
| 68281 | aggatccctt gaggccagga gtttgacacc aatctgagca acatagagag acctccacct |
| 68341 | ctaaaaaaat aaacattaaa aaaaattagc tagacatggt ggtgcatggc tctagtccga |
| 68401 | gctgttgagg aggctgaggt gggaggatcc ctttagctca agagtttgag gctgcagtga |
| 68461 | gctgtgatag caccaccgca ctctagcctg gatgacagag tgagatccgt ctccaataat |
| 68521 | gattgtaagg ttcattaact gtaacaaatg tacctcacca atgcaacata gtaataatag |
| 68581 | ggtaaattat tcacactttc tgctcaattt ttctgaaaac ctaaaactgc tttagaaaat |
| 68641 | aatatctatc tgaatcatga cccaaaatga ttgttgtaag gaatatctac attgattctg |
| 68701 | aaatatatta ggaggttggt cagtttttgt gtgaagagaa acatttagcc aggtctcaaa |
| 68761 | gttttcagag aaggagaaga agatgctatt gtgaggtttg tctggtggag gtgatgagac |
| 68821 | ctcagaaagc acatgtaatt gacaacataa aacaaaacaa aacaagaatg gagatagcat |
| 68881 | gaatagagtc tcattaataa ataacaaaaa acaggttcct tgagtatcta agaaaggcaa |
| 68941 | aattccatgg ccYctaataa atagtgaaaa tgatggaaga gaattcccac gccatgtcag |
| 69001 | ctcaaaacaa gtatattttt tgcccaagcc atgctcaagc tcttgctctt tttctatgcc |
| 69061 | tcctgtgctc atccccactc ctattgtcta ggatcccgca cactgggtta ttgatgtagc |
| 69121 | tagtcatgac acttggctga tggagttcat ttcaataccc tagtagctaa tgtcaataga |
| 69181 | actttcattg attttccagt gtcctttaat tcgttaggta ttgacctttt atttaaatcc |
| 69241 | cacatgacca ttccaaacat tttccacact tttcaagcct caatttctag tcccttcatt |
| 69301 | ttttacaccc tcgtcatgtt cagttgttaa actctatggt ttactgcaaa agctgtgaga |
| 69361 | atctagcgta agtcccttgt gttcttgata ttcaacctca aaatccttcc atgattctct |
| 69421 | catctttagt gacatcaaag gcattagtta tggatactgt tgacacattt aatacccatg |
| 69481 | tgagcctaaa agagttttga atcctctctg agtcacaatg tccacatcag tggaatgaag |
| 69541 | ctattgtgaa gatgaaccaa gaaaatgaat tcaagaatgt gttgcaggaa aaacaaatag |
| 69601 | atcttgttgt atttgttgac tcggatagat tggtaaaact tcctcaggtt ctgtgtttta |
| 69661 | aaaatgtaac agatccaaca catatttgga aggtagtctg ataggatttg ctgtggggaa |
| 69721 | gtgagagaaa gaccaaagcc gagaataatg gtttccagct tcatccatgt ccctaaggag |
| 69781 | atatacctaa tgtaaatgtc gagttaatgg ttgaagcaca ccaacatggc acatgtatac |
| 69841 | atatgtaaca aacctgcaca ttgtgcacat gtaccctaga acttaaagta taataaaaat |
| 69901 | atataaaaaa aatttaaaaa agaccaaagc caacaatctc ttctaaactc atcccttttt |
| 69961 | aattttgtct tttcagccac agcagcagaa aacaaaaaca aaaacaaaaa aaaacagcct |
| 70021 | ttatttccat tttccccagc tccactcact atcttgttcc tagccacaat tatctcttct |
| 70081 | ctggattgta gcYgtagagg tccaattact ctccctttcc actcttgact gccttcaata |
| 70141 | tattttaaca cagcagccag agtgatccag tcattttcct gctagaagac ttttgatggg |
| 70201 | tttccatccc actcagagta aaaactgtcc ttaaaattgt ctacataatc tgcccaatca |
| 70261 | attccctttg tgatctcttt atctctccct ctgtcaccat gctccaagct tatggtaccc |
| 70321 | cttgtacttc cttatactca ttgaacttgg ccttttcaat ttctgtctct cctatctgcc |
| 70381 | taaaatgata tttctctgtc cacctcattt ttttttcagc atttgcttaa agcttattag |
| 70441 | agaggactgc cattgccacc ctcttcaaaa gaacaacttc catcctttgt actacctatc |
| 70501 | tctcttattc tgttttattg ttttttataa cacttacaat tattttatta tgtactgact |
| 70561 | tgttcatttg tcttcctctg gtaaaatgta agctgaagtt ggtctgagat ttcatatatt |
| 70621 | tggtttacta ctgaagcctc aatatctaga aaatatttgt acataaaaga atgaatggtg |
| 70681 | gccacatggc atacattagg taataacact cccctaatta ataaccattc aatgggatct |
| 70741 | cattgctctt taataaaatc aattaaccta ctatagccta ctaaatttgg actttatata |
| 70801 | aaatgttttt atctttgttg aaagactaca ctttgagctt ttgttcctat tattttaaat |
| 70861 | attttgtcca ttaattaaac agcttgttat attcagctac tctcacttta cttcaagtta |
| 70921 | attgagaatg gtaccattta ttggcacaga agaaatgaat gaaggaaata tttggccagg |
| 70981 | agttgcagaa tgcggaatca aaactactat tttagaaatc agtaataata cccagatgct |
| 71041 | attctaaagc tttacaggta ttgactcctt acatgctctt actaatttga tgaaatagat |
| 71101 | agttaatatg cccattatgt agatttaaga catcaaggct tagagaattt aaataccttg |
| 71161 | ctcaaggtca catagccaat aactggaaga accaggatat tagcttaaat tgtttgattc |
| 71221 | cattctctta acaactatgg atatacctct ttggagctat ccaaatggaa aatgaaataa |
| 71281 | gtaatctgat atatgagtct ggagttcKgg taaggatatg gaatggacac atgcatttga |
| 71341 | ggccagtctg catatagatg aagtttaaat tgcccctcta cctttcttta tccctacttc |
| 71401 | tcttttattt tcagtctctt tcaaattctt tgctccttcc ccatttctta aaaaaggtat |
| 71461 | tctctatctt gaaaataacc tgctcatgta ttctaagcta aattaattag gtgtctttgg |
| 71521 | ttgcaaatga caatccaatt gaagtgaaaa gataatttaa ttctcacaaa actggcctat |
| 71581 | tcagggatga gatccaggct cctttcatca ggctttggta tcgcttgctc catctctcag |
| 71641 | ctgtgatttt tttgtgtgtg tgttgcccca gttctcaggc aggctctcct ctcttggcag |
| 71701 | taaagtgact tttagtagct cttaggctta gatttcatcc tcttatctat cccaacataa |
| 71761 | acatagattc tcttttacct gcagttccaa tacagagcct cagctttaac attcactggc |
| 71821 | tctgactatg aagtattgtg ttcaagagga ggcagtgttc tcaatgccag gcctacacca |
| 71881 | cttgcccagg tggagcactg agagtagggg tagctacacg caaaacacct agagcaagcc |
| 71941 | tcggggagta gtgaatccca aggaaaagta ggatgctgtt atcagaggaa ggggaagtag |
| 72001 | ataccaaaca ggaaaaacaa aagatatcct tcaggggctt aaaaacaata gaataagtta |
| 72061 | caggaaacta tcaatagtta catgtacaca aaaatttaaa tcgacagtaa tacaaaatca |
| 72121 | taatgaacta aattaaacta caaacaaaat gctagaaaat atttgtaaaa gtgtaatggt |
| 72181 | gacttgtttg tgtcaccgct tcactgctac atgaagtaaa aatcaacaag aaaatactaa |
| 72241 | gaccccactg gatagatata aaagatatga acttagagtt tcaaaaggag aaactagtag |
| 72301 | gcagtataaa tccgaaagca aatatattgc aatggagaag ggcagttaat cattttttag |
| 72361 | aaagttaagt ttatgaaata tgattgatat atattttatt ttacaaaata atgtaaatgt |
| 72421 | gttatatatg cttggaatta ttttatatgt tgtatttcat aataaagtag aacatcacca |
| 72481 | gaatttgatg acatacttgt catcaataat agatttgaca acactgcaat taacacaaaa |
| 72541 | cccacaagga atttaaaagc atagcttgaa actgaccaaa taacaactat actagcactg |
| 72601 | atatagagct tacttattcc tgacacagtc tcacatacta tgtatttatt acctctcagt |
| 72661 | actcacaatg ataagtacta ctattatctc aatgttgtag atgatgaaac agagagaggt |
| 72721 | gaagtaactt gcccatagtc acatagccaa gttgtagaga attaattatt caaattcagg |
| 72781 | aagtttggct ccagcatcca agtgcttaac tcctttacca gtttccagag aaaaacagtt |
| 72841 | ttgtctgcaa agcatttaaa taaacccagt tacatgtcag tgagaaaaac aatactcaaa |
| 72901 | cagttcagag ctgttttttt ttaaacctgc atatttgaag aaggttcaga taggagttca |
| 72961 | gacagagtat gagtagaaga caaaacataa gattacatag agaaagatWt ggggtgagat |
| 73021 | gtaaaagatt tgcatttcta aacttctcga aattcacact tctttctcaa acacctgtgt |
| 73081 | cttctttcca taaaaaatta aaacttttag aaaggactgc aatatactgt acagtctata |
| 73141 | tctcacttcc ctcttgcatt taatcacact ccatttagat gacattcagc tttaatctgc |
| 73201 | ctagactgcc tgtactcact tcatttctca accctagcta aacttgcact ttgtcccata |
| 73261 | aggctttcaa actactccca tctcttagta atctcgtcct ctgagaacac ctattccact |
| 73321 | tcttttcaaa ttacctttgt gtaatgttac acatctatct atatatatct acatctatat |
| 73381 | ctataaatgg gcatatatac aatctcagga agagagaacg agagagatgg agggagagag |
| 73441 | agaccttctt tttgcatagt ccctgttttg gaaatcagaa gactaaggtt atgtttactt |
| 73501 | tgtatgccaa gcacacagca gaatgcccta aattcatcca tttatctgca catgtttttg |
| 73561 | aatgcatgtt gtattctggg cactgtgcct ggcatcatag atacaaagga gtggaagata |
| 73621 | cttttcctcg gccttcaaag atctctaagt gcacacgaaa aacaaatgtg tagataaata |
| 73681 | attaaaacac agtgtgaaaa atgccatagg gtaatacata cagggtgcca tggcaaccca |
| 73741 | ggggccgaat ggcagcttct gcctggggag ttgaaaagat ttcacagaag aggagaaatt |
| 73801 | taagctaggt cttcagatga gtaggagtat aagaggcaac aatagggata attataaaag |
| 73861 | catgtttgcc ttgataaata gtttgcactt tatcatttag ccagtacaaa ttataaaaga |
| 73921 | gttttacaaa agagaaaaat gtgatttaac ttacgtttaa gaaagatagc tgaggtaggc |
| 73981 | ctgagaatgc attggagtga gRaagagaaa aaaacaaatg gctttttcaa caatctaggg |
| 74041 | aggaataatg gaatgtctac attaaaacaa cagtaacagg agactaacaa aaagaatgag |
| 74101 | tctgaggaaa gttaatattc tttattttat tttattatta ttatacttta agttttaggg |
| 74161 | tacatgtgca caatgtgcaa gtttgttaca tatgtataca tgtgccatgt tggtgtgctg |
| 74221 | cacccattaa cttgtcattt agcattaggt atatctccta atgctatccc tccccccatc |
| 74281 | ccccacccca caaYagtccc cggagtgtga tgttcccctt cccgtgtcca tgtgttctca |
| 74341 | ttgttcaatt cccacctatg agtgagaata tgcggtgttt ggttttttgt ccttgtgata |
| 74401 | gtttgctgag aatgatggtt tccactttca ttcatgtccc tacaaaggac atgaattcat |
| 74461 | cattttttat ggctgcatag tattccatgg tgtatatgtg ccacattttc ttaatccagt |
| 74521 | ctatcgttgt tggacatttg ggttggttcc aagtctttgc tattgtgaag agtgcagcta |
| 74581 | taaacatatg tgtgcatgtg tctttatagc agcatgattt acaatccttt gggtatatac |
| 74641 | ccagtaatgt gatggctggg tcaaatggta tttctagttc tagatccctg aggaatcgcc |
| 74701 | acactgactt ccacattcta tggcataata atagaaattg ataacttgga ggagaaaaga |
| 74761 | aggaagggtt gagacttggt gagaaattta gcagaggaaa atgagcagat ggacactcca |
| 74821 | caacaaaaat aggggatgca gaaggaaaag cagattggaa aagggcaaca gggacacaSa |
| 74881 | atttggctat aggcattttg attttgtggt acctgaggaa cattctcatg gaattgtcta |
| 74941 | ggaacaatta gtcagtgagc atctggaacc caagtgaata atgttgagaa tttctaaaag |
| 75001 | tttaggaaac ataggtattt ccatcacttc cattataaaa acttcattgg gaatgttgga |
| 75061 | ttaataggaa gatcatgcac agaatgatta tttaaggtcc taaattgttc cacctgagca |
| 75121 | tgggtaagga gaacaggtgt taattatttt tgctgcgagg ggaaataatt taaaaactag |
| 75181 | agggaggaga gggttaactt tgggaagaga gttcagagaa cctgagaatg tgatgagttg |
| 75241 | tccccttttc cacccacact ggagaggggc atgccagggg cagttgggaa ggatcaggca |
| 75301 | ttcttcccat aaagtcgagc ctatctctct atgccagcag aacatgctgc agggaggcac |
| 75361 | aattcccacc attctgaccc accatttcct aggtagtcaa acttagggtg gcaagaacac |
| 75421 | ctaagattcc cacagtctag agaaggagga agagctggca aggacaaaga ccagaggaaa |
| 75481 | tggcctcctt gtgcagggag agcccaccac ccactgggat caggagaagg tcctgttatg |
| 75541 | aggagcaacg cttgtgaatg aagaagggtt ctcagctggg tgcctgaaag ccatcaaaaa |
| 75601 | tgttccatga tcacacaaaa gagtcttaca tattttcatt actgcaaacc agccttgaaa |
| 75661 | atatatgtat gggccaagaa aactttgccc accgaagaag aacctccctg ctacaacaca |
| 75721 | cctgccagtg actgcccagt gataaatgct tgcaggcctt gtgaaatgag gagatagctt |
| 75781 | tgcaaagggg accagagtaa aatacgtaaa aagaagggaa gcccttatag agactttaaa |
| 75841 | ttggacagtg gctaagactt tcattcttac atgagattaa acaagtaata atagacagat |
| 75901 | tgagtttccc agagtatgtc agctgtacac aggcaggaag ttaaaaaaaa tacatgtggt |
| 75961 | cataagaata catgtttgca cgtctgaatg gtaagtgttc aaaatccact ggatatgcat |
| 76021 | ataggatgaa actaaaatat agatatggga gatcatacaa cctgtttgta tataagtaca |
| 76081 | agaggaaaac atggccaaaa atatttgttg ttgataagga aggattttaa cactaatgaa |
| 76141 | ggaaaaggat aacgagagat ctgtgaaagg aaataaatta tgtagatgca aatgacttag |
| 76201 | tgaatggctg taggagcaat tttctaaatt tgcaggtgat atttaattgg cagacattgc |
| 76261 | aaacagcaag gagcaattca atcagataaa gaacttgaat cattaagtac ttggcctaat |
| 76321 | agatggcaag cgcagataag tggtgaataa taagtcttga atcaaaacta aagaacagag |
| 76381 | agtgaacatt tgccaaaggg aatgatacca tccaggaatg gctcttagat ttaaggagaa |
| 76441 | cttatagaca aggacaaaca aaacttcagt aaaatattac aaataaaaag atttggtggg |
| 76501 | ttacagctta tccagctgaa gctgtgatga gaaaatctga caacttaagg atagataaat |
| 76561 | cctgaaatcc acggttggct attgaaattc catttgttac ctagaatttc atctatccct |
| 76621 | gatcatggtt tggagataaa attaatgagt aagataacat ccaagcatat aagaggttac |
| 76681 | agatttgggt gaggatacta taaataactt ttaaagacat ttcggatatg aaattctcta |
| 76741 | tgttctatgg gcataattgt gaggtattgt gtttagattg cttggtcatt tttatttaac |
| 76801 | atgccagttc tagtctacgt tagtctggaa attataaaca tagagaaata tgctacaagt |
| 76861 | aaaagagaat aataaaaatt tattatagcc tagaaaggta gttgatgcaa tatataatat |
| 76921 | atttcctctt tctctKtttt tgcaatggtg aatactttac taaatgaaaa ggttaatttt |
| 76981 | aatattaaag agaaatggaa acatccttta gtacaacatt aaaaccacaa atggaacctt |
| 77041 | taaatattca ctcactctag caatcaatgt tccaacctca tttaaaggat tttttttaac |
| 77101 | ttgacataca aatattcaga atgaatattt ggaagcagag ccacgagcca taccttgaaa |
| 77161 | gataactgcg gacttactct tgcctgccat ttggRtactt cagatttcag ttgttctaag |
| 77221 | tctcaatgat cctgagtttt ctttttgtaa tttggtaatt ttgtaatggc aggctttaaa |
| 77281 | ataagtaaag gttttcttaa ctaagaacaa aaaaaaatcc ggagacctaa caaggctcag |
| 77341 | ctgtgtccag gtaggagatg actgcagttt ggcttcagag gctccctcta gcagtgtgag |
| 77401 | gacatctgag tgtctctcct actcatttta tatttcattt gatactgcac agaatcacta |
| 77461 | ggagaacagc cagaattgat ttacttctca tagagacaaa ctgtttctgg gagctagtta |
| 77521 | tcttcttatt aacaaagagc ttacattccc ctcccctcca gagctcctaa aacatctata |
| 77581 | taatagctac attaagtgaa ttctacaatg attgaaaatt ttactataat gaagataaaa |
| 77641 | attcactcaa ttctagttct tttatccttg atttgcattt gaYtgaaatg tgtatttgca |
| 77701 | gtttgggcat ttcagtcagc gattgctcct gtattctttg cccataagca gccttcagat |
| 77761 | ggcctcttag aaaattgaag aagtctctac atgactggaa aactctttct gatggtctgt |
| 77821 | ttcttcaaag atatagcatt acctcttggg aattatagaa acaatatata ttgttaagcc |
| 77881 | tcttctaatg ctactgtaat ttataactgg taactttttc ccccacttag cattcaataa |
| 77941 | gcatttattg gggcctaatg tgtaggtgga attttggaga atacataaag tatagaacac |
| 78001 | agagttcttg ttcttcaaga gctaagcagc tctatagaga agagagagac agaacgacag |
| 78061 | agacagagac agagagagag agagaagaga tcaacacata tccaccactt gctttactat |
| 78121 | ctatacttca acttttggtg gactcatccc atcttatgga ttcaattatc atctataagt |
| 78181 | agaccacttc cccaattgtt tctttaaccc agacctctca cctgaactac aggcttttat |
| 78241 | tcctcacaat gccttcagca ttttccattt ctaatgggta ccYcaaacat taagtgttca |
| 78301 | aaactgaatt tctgatttca cccctttccc Ycatccttgt ctgttgtagt gtatggcaac |
| 78361 | tccaattttc aagttactca gtgcaaaacc tttgagttgt ccttgaattc tcttctctct |
| 78421 | gtcacgcctt atatacaatg catcagcaaa tttgtctggc tgtaaatctg aaatatacca |
| 78481 | taaatataaa tacgatcact tctcaccact cgaaagccac tatttttctc tctttaggac |
| 78541 | tatttcaatg gccctttaac tgctcaccaa gctactgctc tttttcctat ttctgttaaa |
| 78601 | aaatctattt ttaacagagc agccaaagtg attgttttaa aatgtcagat cgtattacac |
| 78661 | tctccctata accctccaat agttttcctt caactctaat ttacataatt ccctataatg |
| 78721 | ccttatatgt tcaattatat acatatacac ttaccaccat ctctgtgaaa tctctttctc |
| 78781 | ctacttccct agtatgagta ttgcttaggt ataaatcaga actcagaaaa ataagagtaa |
| 78841 | gaattaaaaa ggacatatgt gctgaaaaaa atagagcaat gaataaatac tggggaagta |
| 78901 | attagaagga agagattata cagaaaccat aaggcaaaaa gttaatcaaa tttatcaagc |
| 78961 | atattatagg ggacatggcc aactccacaa tttgttcacc tataatctca ggcaagctat |
| 79021 | ttaccttgtc tgagtcttag atttggcctc agcgaaagga aagtggtgat acatcatgag |
| 79081 | cagggttgca gcacagctgg cataaatgga ggtttatccc acacatgtgg gctgaaaata |
| 79141 | ttagaatcca agctaccaag gtcagagtgc ctggctaaga gcttcatatg gaaaaaaaac |
| 79201 | ctttaagtca atgacaaaat gggagagact tttttttttc aggcagtata tagccaagaa |
| 79261 | tctattcctt gaatgctgga attgaaggtt atataaaagc acttattact accaaattgc |
| 79321 | aaagaacaag cagagcaagt aagttgagag agagagagag aSatctttct tggagaacat |
| 79381 | ttttggaaaa tgactgtggg caaagcaatg tgaaaatatt tagggagaca gaagactacg |
| 79441 | aagataaaat acctatatca agaagtttat attgaaattg agaatataaa acagatatta |
| 79501 | tgggataagt cccataggag agatacagaa aaacagagaa atgaaggata actgtaaact |
| 79561 | ctagggaggc aatgtcacaa actcaggtga aaatacatta gaaaaggaaa actaggtatt |
| 79621 | tttcagtata tataatcagg ctggaagata aaagctggtt cagagactag tgaaaacaaa |
| 79681 | tcaggctgga agataaaagc tggttcagag actagtgaaa actaaattgt tcctataagg |
| 79741 | actttaaaag gagatcagca tgtgagtaga cttggaggcc tgctaaagag ggagctagga |
| 79801 | gaaggaatag cacgtggttt ctgagaaaca gtgtagcaat aaggcttatc acacataaac |
| 79861 | taaactaatc atgatgtttt tgtcactatt gtgctgtcag agaaaaaaat ctattgaaat |
| 79921 | aatgaaacat actaattttg agaaacatca gtgtggcaaa acccaagaaa cacttttcaa |
| 79981 | atgaatatac tcaaattgca agatcaaaca tctattaatt ataataggta agaaaaagga |
| 80041 | aacattcaaa aaagtccttc aaagcgaaaa tatgtaaatt agagtacctt cataatcaat |
| 80101 | aaacacttat tgagcatcta ttcatgtgct atcaatgtgt taaaaataca aaagtgacaa |
| 80161 | aaataattat tgctcaaaat tctgtgcagt atttagaaag attgggtagg gataaacatg |
| 80221 | tatttctcta agattacatt acattatgat aaggtttatg gaaaaaatgt acatacctat |
| 80281 | gtatatgtaa aaatagaaaa gagtctaaaa gaactttttc aatctcaaaa cagtgtttac |
| 80341 | atatgaggaa atgtagYgat gactgttcat tgtttataaa tatctgttct ctcctttctt |
| 80401 | agtaatacag ctcctgaatc ataatagcca gatacagact tcccacaata tgaatttccc |
| 80461 | agtttctctc cttagctagt gtggtcatgt gactaaattg tagccaatga tatttaagca |
| 80521 | gaaatatcat gtgatgcctc tgagaaatgt tcttaaagga aggattttta ttcttattct |
| 80581 | tatcttcctc ctttcttctg gctggaatgt taataggatg acttgtgttc aagcagccct |
| 80641 | ctaaagacat gaRttggaag ctatgtactg aggagcacag agcaacaaga gaaaataagt |
| 80701 | aaaataagtt tggttcttag ctctggaagc gtgataaacc tgggatagtc agccagggaa |
| 80761 | cttctttcat gttgattttt aagccagtga tattttgggc atttctttta cctgcaggaa |
| 80821 | gaaaataggc tgattttata taatttgacc ctttaaaaac tagaatatat tcatacatag |
| 80881 | tttttacagt tcagtgttta aacttattta tttttcatct tagttttgct tccctatgtt |
| 80941 | ttgtaaatgg taaacttatt agccattctg tggtatataa aagtttcact tttatgtttt |
| 81001 | gtttttatat tggcccaact tccatgttca gctaaataca ctaacataat ttaaattact |
| 81061 | gcatttcatt gggaatccaa gttagaaaat tccttttccc acatttttaa tacctaaaac |
| 81121 | ttgggaaatg aataacatta taagtacttg aaaataatat tcactgattt atcatgtgta |
| 81181 | agccctgtcg aaatatttat tttctactga gcttggaaga tattttaaaa tgattccatt |
| 81241 | aaagaaattt ttaaaatttt tgaaatatct atttacttaa gatgttgaag aaaacataag |
| 81301 | catctacctt taccttccat tttttagatc tcatatgata tgacaaataa atagaaaatt |
| 81361 | agaggaaatt ttacaacagt actctaaatt aagtaagggt accctccatg aaccaggaat |
| 81421 | tggcagattt caaaaaagca cactcctaag aaatttctgt ttttcacgtg accctgacaa |
| 81481 | aatccattaa ttgtcctaat ttggaagggt acaaactgca gaaaagagca gggtattagc |
| 81541 | tcagcaggaa gcataatatt tcattgccaa gttgctgttg tgactcagta gcagcacttc |
| 81601 | tgttatcttc tgcatggctc ctcactcttc agcgagcaaa ttaggactca ttcacatggt |
| 81661 | gatccagggt tcctggcaca gcaagataga tggcaagcca ttgtgccagc cctccaatgc |
| 81721 | tctgtttgta tcacattgct tttctcccat tgatcaaagc aagttcctgg ctaatcccaa |
| 81781 | agttaaagga tagggaaata gactgcacca attgttggaa gagctgaaca gtacattgca |
| 81841 | aaggggcagg aataccagaa taggaagaac tttgtggcta tcttatgtaa tctgccgtgc |
| 81901 | tgatcagtta gactaataaa ccaagagaag aaatgaagga taataaattc aaatacctaa |
| 81961 | tagagatcag gctgttaagg tataaaagta aagttgggta tagtacctat gcacacaatg |
| 82021 | tgcttgaatt gtgagagcta aagtgaattg aagatctcat gaactttcca agggggcact |
| 82081 | gtctctcaaa ttcaacaagt tgcttgaaac agactccagc aattttcaca tgaaattgta |
| 82141 | agtttgaatt tctatgtaga ctctactaat tttgaattct ggctgaagta ttttaaaact |
| 82201 | gtggttgaac ataaccacat ctgtaagtta cttatgaatc atggaccatc aacatgtgag |
| 82261 | ttttgataga gaagactgaa aggataacat tttacaactc tattaaatat aatataaata |
| 82321 | gtacaattaa tatatatttt atataaattt gtgtcctata gacactgaag acccataggt |
| 82381 | taattacaaa aattgataat acatcatgtg cctccaactc caaaatttat atacaacata |
| 82441 | agtaatacct aacaaattac cagattaaaa cacaataaaa ttaagatgaa taacatttta |
| 82501 | aacaaagaca aaatctcaaa ccacttggaa gtaaaaatag caaatgagca aaaactctca |
| 82561 | tacactgttc ctagagcaaa gaggaaataa aaactaaaag tatagactat ttagaaaata |
| 82621 | atgataacaa aagcactaca tgtaaattgt ttttaaaact ttgcttacag aaacgtgttc |
| 82681 | atctttaaac tctacttaat tactaaatta aaataatgaa tcaagccttc aactcaataa |
| 82741 | acaaaatatg aagccattaa agcttgagtt aaaatgcatt aaaatctgta ttttagaatt |
| 82801 | cataaatcaa tagggttaat tgaagggaaa aaacagttct ttgaaaagat ataaaacaaa |
| 82861 | aacaagcctt gggcatgtct ggttttggaa aatgaaatgc ataaataaaa gtatcaaaaa |
| 82921 | catgtgtaca ccacaattaa gaaaaatttt cacaagcatg atggaacagt aagtacaact |
| 82981 | ttatcgtaat tatttgaaag aaacgtatgg catgaattat tatcaaggaa aacatcccat |
| 83041 | cattaaaatt gacccaagaa gaaatagaag acaattaaat atatgtccaa tatgacaaaa |
| 83101 | aatgttattt gtttacaaac aaattaataa tgttatctcc tgcctgtttt cttaatttca |
| 83161 | ggaaagagta ggccaaatga ttaagacatt tcataaaagt taYccaatta attctgaaga |
| 83221 | gctagagtaa ttcccaaaag aatggctgaa aatgaaatca catacaaaaa aagaaaaaac |
| 83281 | attcaatatc actttagtag tggtaataaa aatacttatt aagtgataat tgaattcttt |
| 83341 | tacaaaattc ttttggatat gaatatccaa aaatcttaaa tgtcctttca tatttaatcc |
| 83401 | gtcagcatat tagaacatag taaagtatta ccaaacaggg tttattacag aatgagcttc |
| 83461 | attcaaccaa aagataacag gagaatcttt ggcaaaatat ctaatagtaa gcaaagttgg |
| 83521 | agacatggat tagataataa tatgaaatca tcatgtgttc taaaaatgaa agaatggtat |
| 83581 | taaaaaatca aaggaaaagg ggaaagtagg ggaaaatagg atatcgtaat gcactttagg |
| 83641 | gaataagtgg aagtaacaga ttttatttaa aattttcaaa acgttaactg gaaaaaaagg |
| 83701 | agtaaaagca taataaaatt tttaaatatt gaggttaaaa actataataa aagtgcaaat |
| 83761 | ctttctagat agtaaaagaa aaacctacca aagaaaacat gctacataga aaaacacagt |
| 83821 | aaatataaca aaatctacac aataataaat aacataaaga atagattaaa taagatacat |
| 83881 | ttttgggata tggatcaaac actacaccct cataatatgc cattttctca agcatacatg |
| 83941 | gaacattgac aaaagtcaat catatattga ttggcctcaa agaaaacact attaagttcc |
| 84001 | atttaagtac tttattacaa atagtgttcc ctcatcaaaa tacaataaaa ctagaaattt |
| 84061 | agaagaacag taagagaagg cttttcacct gaaattaaga aatcatcatg ttaaacaact |
| 84121 | gtagaaaaga gaaaaagaaa caaaaattat ctttaaaatt agtggtaata aaaatactat |
| 84181 | atatcagaat ctgtaaagga tacttaaagg cgtaattagt agtcttggcc ctccccttcc |
| 84241 | cttcccttcc cttcccttcc cttcccttcc cttcccttcc cttcccttcc cttcccttcc |
| 84301 | cttccccttc ccttcccctt cccttcccct tcccttccct tccccttccc ttcccttccc |
| 84361 | ttccccttcc cttccccttc cccttccctt tcccttcctt cttttcttct ttccttcctt |
| 84421 | cttctccatc tccctcctat ttttcctcct tccctttttt ttccaccctt tcttccttcc |
| 84481 | tttagcattt cttcaatcct tactttctcc caagcaaacc tggaatcttt acattgtaat |
| 84541 | attatttaaa agccaaataa aatcaaataa tatttaagaa aactatcaag aaatttcaaa |
| 84601 | tatttacaaa aatttattct cttgaacagc aagagaagga aacagtttag taagttagat |
| 84661 | aggcagaagt agacctagta cttgtgaaat gtgtgccaaa actcttcagt aactattttc |
| 84721 | cttctgcttt ctgtagaaaa tatttaaagt tgaaatgaaa gcatttcctg aagtgatacg |
| 84781 | tgaattacta caagcaatat gtacaaaaca tgaaaaacag aggtgatatt tagtttggaa |
| 84841 | ttgtcatatt caaaatcaga aataaaattt tcattctgat agagcagtga gtttgatttt |
| 84901 | attctcagat taaattacag aatggattat taatcagatg tgttttagat gattaaaata |
| 84961 | gcagttcatg tttttgatag cattagctat tcaggatcaa atgaatatct gattaaatat |
| 85021 | gtattttgag ttcaataatg ccttttacaa agcactUaa accctataga caaacgtggc |
| 85081 | ttgatggcag tgtagtaagg aatatttata ggtgattgaa aagctatatc taaagtttta |
| 85141 | actagtgagc tatcatcaaa gtgcatagaa ctttagaggc atattgccat actttgaact |
| 85201 | tgccaatgta tgtttcatca atactttact agtaatgtga atgaagaatt aaaggcttgc |
| 85261 | tcctcaactt ctgaatggct caaacatggt aaaataaagt tgacataatg aatgagaagt |
| 85321 | atagattaca gtagatgtga aaaatacaaa agaaccaaag aatgaaatta aagagacaaa |
| 85381 | tataaaatct aacatttgct tcaaYtgcat aagactttgt gggctactag tttgatagtg |
| 85441 | tttattttaa aaatattttt aaaattttat ttgaccttaa atttagcata aggcagtatt |
| 85501 | aaaaatcacc taataaaaat gatacagcct ccaattttat ttaaaaagtg tataatttat |
| 85561 | atcaattgag gaaactgatt atttagactg tgttcacagg agaatgacaa gtattttgag |
| 85621 | ggacagaaaa tcatatcttt ggaaaaagtt tgaaagcttg tcatagggca gatctattta |
| 85681 | gattgataac ataatgtatg gatgacaaaa ctaaaacatc taataaagag tacagggaag |
| 85741 | caggtattga ttcattataa aatcaaagtt ttataataat tagaatattt caaatgcaaa |
| 85801 | attttcatct tagaaaaagc aactggactt ggtgtaatgt taaaataatg catgtaaaac |
| 85861 | acatgatact tggtatatag taagcactaa ctaaatgcat actattaatc ttaccaatat |
| 85921 | aatgttctta gcattatatt caagaataaa ttagatcttt agttgttaca tataatcatt |
| 85981 | tattttagat taaatttaga gtaaatgtat ttcaatttgt ctaagcttct aagattcagt |
| 86041 | gattatattg cttattagtc atgctccatt gtatcatcca tccatatcct tttcatgact |
| 86101 | tgagagaatg caaatcttgt atcttctctc aaggaaaata ttatgactat ataattaaaa |
| 86161 | taattttaaa aatgtattta tattccagtt ttagtgctag tcctaatcaa aatttaaata |
| 86221 | atcattttac aataaatatt tgacatataa tattttgtaa tatattgaat tttctatagt |
| 86281 | agatgcctaa ttatcttagc tatttgcaaa taatgtaagt gtaaatatac tgataaatca |
| 86341 | agaaccttac tttaattatt gacataatta ttcaggatat taatctttta tcattgctat |
| 86401 | aaaacagtca attttcatat tgccattttc tttttattat Ktaaatacct ctctctgttg |
| 86461 | ggaatgcaga caaaaagatg gaagagattt ataataatta ggtaatataa gtttagtagg |
| 86521 | ggctccatct ttatttattc atatattcat agcaagtatt tattgaccat gaattctatg |
| 86581 | ccagaaaatg tgatatgtaa tttttttaaa agtcacaatc cttgctttca tggagcttat |
| 86641 | ggcctagtgg aggagtcaaa cattattgaa aagatcatat aaacatatgt aagattgcag |
| 86701 | ctgtcatagt ggctaggaaa gtgaggaatg taaacttctg atagtgtaaa caaattattg |
| 86761 | ttccaatcaa agagatagtg gatagcttcc ctgtgaaaat gaaaatcaag ctgacatata |
| 86821 | gatataaatg agtgtttact tgaagtttca ggagggtcaa tccagactgt gggaacagca |
| 86881 | tgtacaaaga ccatgcatca ggaagaactg ctggaaggga aaatggtaca gtatgaatat |
| 86341 | gttgaagcag gttggggata gcctacRtaa aggtgtgtag accatgtttt taatctttct |
| 87001 | cctaagagcc atgcaaattc attgaaaatt tttaaagtgt ggcaggagac aggatcagat |
| 87061 | ttgctctata gaaagactac tttggctaca atagggagac tgaagaggaa gaaaggtaga |
| 87121 | Yttcaggtag tcttacaagg agctggagcc taggaaaaca atgaaagctg gaaatagtaa |
| 87181 | agaaatgaat ggatattagg atgctcagga ggtaaaatca ataatgatag atttgatagg |
| 87241 | gggcataggc tggagaagat aatgaagcta acaagtttta tgacttatat aaaaagacac |
| 87301 | cattaaagca agagatgttg gaagaggact ggttgaatat cataagtatg atgttggcca |
| 87361 | tgttaaatgt taaatttgag gtatttttaa gtcatttagt agaaatgtca attatgtagt |
| 87421 | tgaataaatc agtctagatc ccagagctca gatacacatc tagaaataat acatttgtaa |
| 87481 | attgtgtgta gatggggaca atagcagtaa tgaacacaga tggaattgcc taggcagaag |
| 87541 | agctcaaatg agaaaaggat gtaggcccaa gtccagagaa ctgctaacat gagcttgaaa |
| 87601 | aaggaactga gaaagaggtg tatgttatgt catgaaattc aagggaaagt tgtgtttgtg |
| 87661 | atggagggag aaatcatcaa tgctaaatgt caagagacct gattagatga gctttgaagt |
| 87721 | atatccacta cgttcaacaa tacaataatt aagaagtact ttttccatga ggaatagggt |
| 87781 | atccaacaat atggggaaaa agagttttct cagagtgact gggatatata aaaatggaga |
| 87841 | gaaaatgtgg taatgtggag taaccagaga gtagagggaa gggctcaatc tctttgattt |
| 87901 | cattttaaca agaaacaaag aatcttttaa tgggaaatct agttaatagg atgatgttga |
| 87961 | atgcatgaga caggaactta agtatctgaa atagagagag attgatacat ttaatgatgg |
| 88021 | aaggttagcc ttaggaaagg ggacagctcc tgtattgtgg aagcagataa atagagtaga |
| 88081 | ctgggtatgg gctataggtt ggaacacaga aataagtatg atttttaatc tcccatcttc |
| 88141 | tatgttctct atataataac agtaggatta aagatgtgac aagtcgttgt aaaaagtgga |
| 88201 | caagtgagtt gaccaaataa ataaaaacct aagaagggta agaataaata attgtctttg |
| 88261 | attatttctg gttatgttgt ttattgatat ttaggaagtt ttagaactgt ctttctgaat |
| 88321 | tagtggtcct tggccttttt ttttttatta tactttaagt tttagggtac atgtgcacaa |
| 88381 | tgtgcaggtt agttacatat gtatacatgt gccatgttgg tgtgctgcac ccagtaactc |
| 88441 | gtcatttaac attagatata tctccaaatg ctatccctcc ccctcccccc accccacaac |
| 88501 | aggccccggt gtgtgatgtt cgccttcctg tgtccatgtg ttctcattgt tcaattccca |
| 88561 | cctatgagtg agaacatgcg gtgtttggtt ttctgtcctt gcttggcctt tttttaaatt |
| 88621 | ttgcttcagt gcagcacctc taatataagt aaggactacc acatactcat tatccattac |
| 88681 | agtgttctgc tgtatcattg attctgaagg atggagtgaa gcacctcttt aggaagacta |
| 88741 | tacaaaactc agagatggga aagagagaga gagagagaga gagagagaga gagagagaga |
| 88801 | gagagtgtgt gtatttgtta gaaaaagttc attatatgat tctgatatgc ctcccacagg |
| 88861 | gaggctagaa atttctcctt gaaaatagaa tagccaaatg ttgaaaatag accagaattt |
| 88921 | aggaatttgt ttatagatat atgacaagta attgttaaat ttaataaata gtgtagcaca |
| 88981 | tacaaataat cagctccctt ttcctaaata aaaaacttta gctattttta ttctatttta |
| 89041 | aaaattcact tcgtgatatt taaaggtatc cattattaaa atcagtaacc attccaattt |
| 89101 | ataatcattt aaaagtaaaa catataatta tttattagaa aaatatttgt gaacatttta |
| 89161 | taaatattat caacatgttg tcagtaaatt cctcctcagg tggaattttc tgactttggt |
| 89221 | tgagtcatta aatgttttgg gtcactagtg atcaattagt aaattactga tccatagtac |
| 89281 | tttaatggcc tgaaaaagta aatgcatctt ctgagcacct aattgaatct tagttattta |
| 89341 | ttcatcatta aaatcaagat aaatgagtca gctcacaata atgaaactga acagttacat |
| 89401 | tcatttcaca aatagattaa actaaagctc agaaaagacg ggacaaggga gttaaacatc |
| 89461 | caggttagat tttccatctg aaaagaccca attcccaata tcttgctata aaaattaaat |
| 89521 | acatatatga gtttgaaagc aatatttttc tgcaagttca ttttcatata gcgttattaa |
| 89581 | gtttaatacc attcagttaa taattgtaga tccatgRtac gtatactaat atggtcttgt |
| 89641 | tataatgtaa atagtacagt ttaaacagca aaatttcaca ctgttttaat ataaaaaatt |
| 89701 | tcctagaacc aattaccctg agtgcctact atatggttca tttggaaaat gaatgatagc |
| 89761 | tgcaatatgg taaaatgatt atgagcacag ccttcggaat aagtaaaaca tagctttaat |
| 89821 | atctaacttc tgtacttact aactgagatc tgaacaagtt acttaaactt ctaaggttta |
| 89881 | gtttctccac ttacgaaatg gagaggaaaa cacataattc atagttcatt gtaaggacta |
| 89941 | agtaaaaaaa aatacttaaa tacttagcac agggcctagc aacaaagata tatgaactcg |
| 90001 | gtacacacag acatacaaac acgtacccac actgcttaac tttagctaga atatttttaa |
| 90061 | aagcattatt agtttgagac tagattcatc caagttggtt tagcattcta ctagggatgt |
| 90121 | tacttttcat atctttcttt gtttttgttc ccaaaagcta taaacacaag ttttatcttc |
| 90181 | tttcctgaaa caattaaaaa gaaaatacaa gaaaatgttc aaaaaataat ttactagtgt |
| 90241 | ttttgtttgt ctggaagggt catcctgcag ctttaatcac agctgaagat cattatttca |
| 90301 | aaaaagacac atcttttaga tatttaaata tgtattatca tattatgcag tttaaatgtg |
| 90361 | aagtcatcta ccctctggtt tactgagatt ctgttacatt ttaaataaat agtaaatgct |
| 90421 | gtagttaaga gtgctatcac tgagaatcta agaagacaca ttagaaaggg attattactc |
| 90481 | caagaagaat tctctttcct taatcattac tttttcatta aaatatttct gaagtttata |
| 90541 | caatacaatc atagtagtga ccttaggcat atgacacctt agtgctataa aaactctaac |
| 90601 | aaatctgttt agagcccaat aatataaatt tctgtgaaga gaaatataaa ccaatggtaa |
| 90661 | aatgccatgt tgaagtttct aaatagccca cctagtaatt tacatgttaa gaacatattg |
| 90721 | aatatcttgg gaacatgttc ctagaaaaga ttctccatta taagcttttc ctttactgtt |
| 90781 | aatgattgct ttgataaaat gacccacgaa aaaagacaat tttctccctg tgttatctgt |
| 90841 | gtctgaaata ttcttcactg attttacata tgctgataat atgaacaagg taatttgtct |
| 90901 | gactctggtg gggcaagatt ttcagtaaga aatgcaaaat tcacacatag ctcttctgta |
| 90961 | agaagtctWt gcagtgtttc agtttatata aaaagattta tattgcctga ggcatctatt |
| 91021 | tttttttcct cgaggcaagc tgaagtggca caaatgaaat tgtttttcac actgttaatg |
| 91081 | tattcctttc tctttcaatt tctcagagag ccgacatagg gatttctgct ttaaccatca |
| 91141 | ctccagatcg tgaaaatgtg gtggacttta cgacacgtta catggactac tcagtggggg |
| 91201 | tactacttcg aagggctgaa aagacagtgg atatgtttgc ctgtcttgca ccatttgatc |
| 91261 | tctctctatg ggcttgcatt gctggcacag tccttctggt gggtctactg gtctacctct |
| 91321 | tgaactggct taatccccca cgattacaaa tgggatcaat gacgtctact actctctaca |
| 91381 | actccatgtg gtttgtgtat ggatcttttg tacaacaagg taaggagcaa aagtacattc |
| 91441 | tagtatttaa aaaaaataga atgtgatgtt tccaaagcca tgtattcagt taataaggtt |
| 91501 | ctgtatctga catcaataag tgttctaaag ggtactcaca gaaatgctca gaaaagaaca |
| 91561 | tttgctactt cctcctagtg gatctcagac acaccaagtt tccagcaata atggttcatt |
| 91621 | gtcttttgat gtaagtttaa tttcatcaac aaaggcaaat gtgaatgtca aaggtaaagc |
| 91681 | tcacagaaaa catcaagatc agattttcct ctccaaactc tgactttctg agaaatagcc |
| 91741 | ttataaggat gaaattactt attaccagag aaggtactat ttaattattt acatatgtaa |
| 91801 | gaaatgttag gacttgttct ttgttcagag acattatttc atgcattaaa aatattgtca |
| 91861 | ttgaaaagac tttggttaat ttgagactga tgagaaattt tgtgttttat cttttacttt |
| 91921 | gatatgtaat ctttactggt gatttaactt acaatttcac tattttctaa agaatgtcat |
| 91981 | tgctctgtta tttaatatcc aatctgccca actctttaaa cttgtccaat taattatttg |
| 92041 | gctctcactg tttcaaaata gaataatatt tattgcattc cttacttgag actattgcct |
| 92101 | catagagaat gaaatagtaa gaaaattgat agtctcttgc aagctctaca catatattga |
| 92161 | agaggaggat gtttgctaca atggagacat tatacttttg tgctaatatt tacaactctc |
| 92221 | aataacatct ttctttttat tcctattttc tcttggacct tccatttaac ttcatttttc |
| 92281 | tattctaatt taatcaaaga ttagtctaga accttcatct gacttgctaa cttctaatct |
| 92341 | agcccttaaa ccttttgtaa gcatgctttt ccctccaccc ttccatatcc agggctctaa |
| 92401 | gcttacctgt tactgtatat ttttcacaga cacttttagt tctttcatta ataattaatt |
| 92461 | cagtaaatat ttaatccaca ctatctaagt agaactttcc taagcaatta gtgtatgatg |
| 92521 | gtgagcaaga aggtctttgc catcattgcg ccacaacaga agtctaatga gacacaaaca |
| 92581 | tgtaaacaca ggattacaat tgtgggtaga aagttctgtg gtaggataag catagactgt |
| 92641 | taggagatca taggtgtaga agcacttaat atatgttaat gtcgcagaga aggcttttta |
| 92701 | aagtaacact ttatacagag agacagagtt aactatggaa agtgcttctt gaggaagatg |
| 92761 | aatggagaaa aggagacata aacggttagg atggaatttc agaccaagaa gtgagagaga |
| 92821 | aattaagata gtccaagcag agaggatcta gtaaagatga ggctgaagct acatttgtta |
| 92881 | ttataaggag tttgaactga tccttgaaat gatcagatat ttaaagataa taaatgggaa |
| 92941 | aatacagatt caaattttac tctagaaata ttctggttat aatgtggaga atagattgaa |
| 93001 | aaaaggcaat gtgaaaagtc agacaaatta gaagactatt acaataactg agcaaagagt |
| 93061 | tgatgtggct tgctcaaagg taaggtagct ttgggagtca agaggagagt attgatgaaa |
| 93121 | tggaatcaac aggctttgat tacctatagc gtggtgtggg ggtcagtact gaagaaaaaa |
| 93181 | ggagataaag ttttatccta ggtttttgaa tagaaaatta tgtatattgg atgtggatct |
| 93241 | catttactga aaaaataaaa cagaaaaaac agatatgaca ggagagatga tacattcatt |
| 93301 | ctgctgcaca ttgagtttga gctatccgtg aaacatccaa aagagtatta ctaatgtgtg |
| 93361 | cttagtggtt tgatatattt gtcagatgca cagaagagac atctggactt aatatatatt |
| 93421 | taggagatat tggaatgtag gaaattttga agacatggga gttaatgaga tcacacagag |
| 93481 | tagttgctct taattgcaaa ctcctgattg aggaccactg gcccatacaa agcctaggac |
| 93541 | agagctctaa ggaaaggaat ggatagagga gcactcagtg gtgcctgata aggagtgact |
| 93601 | ataaatgcac aagtgaaaat cagagcagct agtagtatac gtttggttga ctgtgttaaa |
| 93661 | cctttcaaag aatcaaatga aattaaggct tgaaaggttt ttgttggatt taacaataaa |
| 93721 | tttattattg aagcaaaaaa ggcttgtctt tgccctatga tgtctgaggt ttcagctaga |
| 93781 | caattcagag gccagaggct aaaatcatcc aaaggcttgt tcatttcact cacatgtctg |
| 93841 | gtggttgatg cggtctgtgg gctagtggcc tcagcttttt ctccatttgg gcctctccat |
| 93901 | gaggtcactt tgcatgggat agtttgactt tctcacagca tggtagttgc tttctccaca |
| 93961 | gagaacatcc caattaaaga attttatgtt ccaggttggg agtcataaac ttgtgtgatg |
| 94021 | gtgtgaattc ctcttgcaga gaacatcctg gatgtaccca cctcatgggt ttttatgaga |
| 94081 | atttattaat gaatggttaa aattgtgaag ttcttagata taacttatat aagtgtcaca |
| 94141 | taagtgttta ctaaataaat aaaacaatga attagactca gcggcagata attgacatat |
| 94201 | gtaaaaaaag ggataacaag acaaatgatt gtagatcatt ttgatgtaSa tattgattga |
| 94261 | aatagtagat catggggtat atggagaact agaaagagaa ggaccaagaa tgcgaatgta |
| 94321 | aagaagagta agggtagaaa ttgatagagt aggcctggca tggtggcaca tgccagcact |
| 94381 | ttgggaggcc gaggcaggcg gatcacctga ggtcaggagt tcgagaccag cccggccaac |
| 94441 | atggtgaaac accatctctg ctaaaaatac aaaaaaatgc caggcatggt ggtgggcgcc |
| 94501 | tgtaatccca gctactcagg aggctgaggc tggagaattg cttgaaccca ggagcgggag |
| 94561 | gttgcagtga gccgagattg tgccattgca ctccagccgg gatgacaaga gtgaaactcc |
| 94621 | atctcaaaaa aaaaaaaaaa aaaaaaaaaa aagatagagt agttaggaga gagtagtaga |
| 94681 | ggtctcaata agattacaga aaaagagtga aaacataatt ataaatgagt ttggagtctg |
| 94741 | tatttataaa ataggacatc taagcctaat tttttttgaa atgtaataga ggagaacatg |
| 94801 | ttgtaggtat gtggatacaa attccagatg ttaagatttg gtgaaggact tcaaagctga |
| 94861 | tcaaggaact gagagataaa gggttaggtg agccagctgt aatgatggct tggattagac |
| 94921 | tggagaaaaa gaaattgagc catgtgtcaa agttgtgaat aaataaggaa ggatgacaag |
| 94981 | gatgttgata gatatgagca ttgaccagaa ataggaggtg acatacctag atataattaa |
| 95041 | cctctgtttt catcttactt cttccaattt attcagtttt tcagtgtatg atttcaacaa |
| 95101 | ctgccaatat gctgatgact cccagatcta catcatctat tcttgaactt cagatttgta |
| 95161 | tattcaactg ttacctaggc aactctctga ctataccaga ggcaccataa atttgaacat |
| 95221 | gccaaaaatg taattcattt tagaatttga accttcttag cctctcacat tctctattcc |
| 95281 | agctgatcca ccaccaacca ttcagactca tgttagaaac tctgaaaata gttttcattt |
| 95341 | cttcctcttt ctcatcttgt atatccaacc ataatcaagt cctgtcaatt ttacctacta |
| 95401 | aatatttcta gaagtggaaa tctcttctta tctagaaaga ttagcctaga ttgtcaccta |
| 95461 | gattgaggct acctcatttt tcacctgaac tataggagtc tcataagtct ttcttcttcc |
| 95521 | agtgttgtct cctgcaaata tacgattcac atacttgcat atatacccaa gttatccatg |
| 95581 | ccatggaaag ataaacacat aattcccatt cttcagttat tttcttggct tcccaatgcc |
| 95641 | cacagtttag aagtctgagt tcttcagagc ataaacaata ttccatcacc tggctcctgt |
| 95701 | ccaacactca gttctcatct cttaccattc gtgcctcaca tttaattgcc cagttactcc |
| 95761 | aaacttacgg tttgaccata agacaagact ctttcctaac tcttcacctt Kgtatctgct |
| 95821 | ctttccaatt ccttgagtgc ctttgttacc aacctgatta gactctactc ccactctctg |
| 95881 | tctttataca gcaagttcct attcatcctc taattttttg cttttatttc tctactttca |
| 95941 | agaagtcttt cctgggattg agaaccatct tctatactcc tcaacatgta tttgtcatag |
| 96001 | tacttaccaa ccatagtgta attccttttt ttaaacatgt ctccacctga gtcctttgaa |
| 96061 | tataagatag tgtactattt aatctgtgta gtctctttgc ttatagttaa gtgccttgta |
| 96121 | catgttaggc atttaataaa ttcatattga taaatttaat gaatggatgc taaatactta |
| 96181 | actaaataaa gcatggaggt tagctgcaat attttgttta ttagattata gtctcaaata |
| 96241 | aaacactaaa attatccaca aatgacttaa aactcactaa accaaaaaga aatttatctg |
| 96301 | taatgtcccc actgagttgt tgtaagaaac taagaggagt ttataagtaa ggcatcctct |
| 96361 | tggttgaagc ctcatttgtg aagacgttga catacttatg aattggcttt ctgaattctt |
| 96421 | cctccaagtg accaaatttc aataagtttt ggagcacacc caggaaaaaa gataaataga |
| 96481 | attacccata tggttagcat gcttttctag ttctataaac atgcaacaga taacaaaagt |
| 96541 | tataaatatg ttaaatacct ttctatccca ctgctccctt aaatgagttg cacagcctgc |
| 96601 | aggttgattg tacatttata caaatttata atgacagata atgctgaatc gcatatgatt |
| 96661 | agctacttca tctttgaaaa gctgctattM ttccacttgc taacaatgaa aaggtgaatt |
| 96721 | cattaaaaga Yactgagagc atctttatgc tctgattaaa aataaatgaa gaaaaggctt |
| 96781 | ataaacccta tgaaaaagag aataaatcaa tgacagtgtc catgtatagg caattgactt |
| 96841 | ggaactggtg atatttccaa taaaaataca gtcttttaag aggaagtaca gctgttattt |
| 96901 | cagaattgca gtcttcattg agccactata ccagattgaa tagggataaa gaggcatttc |
| 96961 | atgtgttatc agacagattt ctaaaaaaag agttcacgga cagccaaaag cagaaaaatg |
| 97021 | ttaaatatat gtgagttgtt tactaatcct gacattttaa aaaatctgta acttcaaagc |
| 97081 | attctggaaa aatagctcag ggaatccaac tgtgcaaaag cagtatggtc cattatagag |
| 97141 | ataaactcag tacatctgtt tggctggaac attaagagct tgtgaattag gttgtaaaat |
| 97201 | gcacgaatga gagaccaatt ttatacaact tttgttgtca ttttatgtcc tccgttatct |
| 97261 | ccatgtgtac atacatctcc tttcaattaa tattcttaag tgaaactgga tttgattttt |
| 97321 | agaagtctct tatgtttagt ttattggcag tgactctatc atctggtctc cagaggactt |
| 97381 | caatgacttt gcaaatgtag ttgtatgtaa tttKctttct gtttacatgc aaagggaaat |
| 97441 | ttcagaatta tcttcagatg tttgtgtctg attatgggaa atagaaatat ttatagtcat |
| 97501 | gtaaaatatt tgaagcaacc acatatatgt ttatttagca gcaagcattt attaagcacc |
| 97561 | aacaatgtgc caggaacatg agtagcaaaa ggaaaataag gaataactct taactagggt |
| 97621 | ttaataaata tttcacgagt atactatgtg |

[0316] Following is a genomic nucleotide sequence of a PDE4D region (SEQ D NO: 4).

| >5:58309301-58408050 | |
|---|---|
| 1 | ctctaaatat tttccattga tgaatttcta attgtttttg gcctaagtag tctgaaaaca |
| 61 | atacacagat ttagggttgc aactaaaaaa acgggaggat ttctaagtga atgcttttga |
| 121 | atcctttgtt ctcattatac atcagaatgt ctgtgtacag cagttaaggc ataaaggaaa |
| 181 | gtaaaaatgc agttgaatct caatactgta ttttgctttt cagaactgca attcttcaat |
| 241 | ttacattaSg catttaagat tgttcaggaa gcaaactaaa ataataaaac aaaatgtcct |
| 301 | taaatgtaat ctcctttact tctacatcac gccagtgtgc tactgggtat attatatatc |
| 361 | ctcccaatat atatttaagg aggtggtatg ggtccaatag taagaaaatt ttcttatttt |
| 421 | ttcctgacaa tattctgcta aaaatcattt gaatatgctg cactgtgatg cattacaagt |
| 481 | ttggtagata tcagtattca aagttattta aacaaatact ccattgatgg tataaaaata |
| 541 | aaWccttcaa aatgcataag accaaatata tctatatttg ctatttttac atgtttttaa |
| 601 | aggtacagta ttaaacataa agctgtccag gaaaaatttt cctcaaaaag aaacgtacta |
| 661 | aaattctata tgtagattct tggcaatatt gttcataatc atagtacaaa tggttcataa |
| 721 | tcacagtaca aatgtgaagc ccttcaaaaa taacatcagt tgtgagctgg ctaaaagcta |
| 781 | ggagctgaat tctggcggat aatgagggct tcttatattt actctctata cttttctgca |
| 841 | tttctgaaga tttttagcca agaaatggct aacaaaattc aaataatgga agtctatata |
| 901 | ttttaaaaac atttttaaaa atctgaatca tccacagatt taaagggagg taaggaatca |
| 961 | tgactacttg gaYaaccaag actgaaataa gttttctaat ttttttagaa ttcaagtaaa |
| 1021 | tctctaaaac aaaggggaac ttgtccttca aaaagaaaga aacaaagcaa acgacRaaca |
| 1081 | ctccaatctg aaaaatcctc agagtaacag aaaatgaatc ttttaaaatg tgttgtgatt |
| 1141 | ggctcccagg ttcaagcgag tggctcaaat accaaaaatc tgtgaagtga tgtttcattt |
| 1201 | aggactgaat aaggtttttc tacctccttc tattgtggag acaggatcac aatgctaatg |
| 1261 | ttaccacagg gcatgSaaaa agcctgccaa gcatggacac aatcttattg aattgtttat |
| 1321 | taattcattt cttgagattc acaaaacagt gtaataaaaa ctttgttcag ttttgcaagt |
| 1381 | ataatagaca atcaagtttt cactttagta tcacttacat agttaagtaa tgtcaatttt |
| 1441 | taatgtcacc tagggcttta tagctaaagg tgaaaaaaac gtattcctcg tcaggttaaa |
| 1501 | gtagtataga tttttagaaa cagccacaaa ttaattttat aaactttatg tgcaacatac |
| 1561 | taactggaat ccataaatca gtataagtaa tttggcccRa taatttattt gcaatgaatg |
| 1621 | tatttaatta ccatatattt ttcaagcaca attcaaacat ataccacatg acaaacagaa |
| 1681 | gaactactgc gtatctaaaa aagctatttt aacactcaaa ctacaactga tgaaagttat |
| 1741 | acaatcttat cttgaccact attaacacgt atttcttcct agttcatgtg taaggaaaga |
| 1801 | atacataact gatagtttga acaaattaca gtagagtcta agctttctaa ataattttgt |
| 1861 | aatcagagta aggagttttc aaaagctaag taagtcttac ctttatgtag ccccaagaca |
| 1921 | ctgacagtaa atagtttgct tcaggcattt ttgattgatt atatgtatat atatatatat |
| 1981 | gtatatatat agtaagctct aaaatgtatt tagcttcaaa atctcgacac tttaacaacc |
| 2041 | tccacaagcc acgcagagta tgagttttta aagatttttg gtaattaagt atacataaga |
| 2101 | aagcctcgca ttaaatccca tccagccgtc ttcccatcga atacatgcca tttgtaagac |
| 2161 | tccagaatgg cacaaaattc agcaactatt ctgaataaag aaaatccacg tgataaagga |
| 2221 | atatctaaag atctaagggt ctgcatcttt ctctcccgag ctccagggct taatgaataa |
| 2281 | tgtatgtcaa gatgcttagt tgcaagaaag gctagtcctg tcaaaagcta ccaaataagg |
| 2341 | aactgcaggg aagccgggaa gagtgacaag aagcccctcc cataaaaccc caactctgca |
| 2401 | ccaattgcat tccagctctt agcctataag gcgagggggt gtggcctcgg tgcaggctgc |
| 2461 | tttgggattg gttggcaagg gccagcctct ggggaggctt tctcctcacc cgacaaacgc |
| 2521 | cattgaataa tggtatccct gcagctctga ggccaccctg agaaaagatg aacggggctt |
| 2581 | ccctcttgca gtgatgaata atgaccataa aactcctcaa aattcgtagt tcattcttaa |
| 2641 | gaattgccca tccttttgga gggcattttc tatgaatttt aatgtcctct ggcttccctt |
| 2701 | ccttccaaat aaaaactgct ccaaaaatgg caatcgagca ttttaattgc ttccYtctct |
| 2761 | caaatccaaa acaagtggct ccctggtgat gtagaaatga ctgtagttct cccctcatcc |
| 2821 | aacataaaag catagggatt aaacaatacg actaatgtcc agaattcaca gatggcacag |
| 2881 | atggcaatga cacattccct cacctgtgtg Scatggctgc tctcagctcc ttttgtttct |
| 2941 | attgttatgt atgacagagt tctaaaacct tcaaaatcta ggggtgggac cacttgcaat |
| 3001 | tctgggggga gggaaatgtg aaagctaggg cactgtgtat gcataaggaa tgcagtgttt |
| 3061 | tgtatataga actcaggatc tgtattttga tcagaagaga atattttatt tatttattta |
| 3121 | gagacagagt ctcgctgtcg cccaggctag agtgcagtag tgcgatcttg gctcactgtc |
| 3181 | acctctgcct cccgggttca agcgattctc ctgcctcagc ctcccgagaa gctgggatta |
| 3241 | caggcgccca ccaccacgcc tggctaattt ttgtattttt agcagagacg ggatttcacc |
| 3301 | atgttggcca ggctggtctc aaactcctga cctcagggga tctgcccacc tcagcctccc |
| 3361 | aaagtgctgg gattacaggt gtgagccaac gtgcccagcc agaacagaac attttaataa |
| 3421 | ctgtacacaa agttaagaaa ggaatgagtg gctcttagga atccagaatt gagctcaaga |
| 3481 | gtaatcagac attttacgag gagggttaaa tgagaaatca aagttctttc tagaaaaaca |
| 3541 | gcattttcta tttggtttgg tgtagtatta ccctgtaact ttaatactaa agaggtcttg |
| 3601 | tgggtgagaa acaaggaaaa actaggtttt agttgatttt agcatataat tctgtgcatt |
| 3661 | ttacctcctc tccatctcaa agcctgtgct tactactctg tgctttaact tgctggtatg |
| 3721 | gctactctgc agtcttcctg acatttaact atttccacat gtggcatgtc tgtcttagag |
| 3781 | agcatgctct ctgataagca ctcctgtaac actgtgtctc tctgagtttc tattggcctt |
| 3841 | tagctgctac agtcctctgc ttttgttaac atctgttgta ttcatttcca tcactcttac |
| 3901 | tcctctacaa aaggaagaaa ttaaagctcc aacattccac taaagctacc cccagaggaa |
| 3961 | tactaaggtc ctccttttct ctggtctccc tacttctctg aagtgttcca catgtttgat |
| 4021 | cattcctact actctccctc aactcccagg atcctgaact tctttaattt tccctaggcc |
| 4081 | cacaatcttc aatgaccact tctaacttga acttcagtgc catatttctg aatacaagat |
| 4141 | tctcctctcg aatgccctgc tagtcacgac aaactttttc aaaactgtga gacatttttc |
| 4201 | tatttaaagt agttcttagt ataattactt ccatttcagt cagtgagcct atatttcttc |
| 4261 | cagtatctca gatggaatct atgactcttt cctaccattc aacaggtgtt tcatgtgcgt |
| 4321 | cagacactgt caggtgttta atataaacca tctagctgaa tccttgagta acccggcatg |
| 4381 | ttcccctata cggcatcacc ttccctcctt cattcaactt tgttagcaag ccctatcttt |
| 4441 | tatccagagc tgtttctttc agtttRttcc ttaccattac ccctcccgta atctgaatcc |
| 4501 | aaatatttaa aagactgaga gaaatagaaa gtaactttaa tatcaccccc tctaactccc |
| 4561 | tcatttccac ataaagttga gacctagaga gaaaaaatga ttttcccagg ttcactctgg |
| 4621 | tactgagaac aagaattgca agtttaaatc ttttgtgcac aatcactgac aaataatctt |
| 4681 | tttagtgtgt cagcttcctc atctgtaaag tggattactg tggcagctag tctccaaaga |
| 4741 | tactcttaat gagccacact gtcctacact gaatctgagt tggcttgtgt aaccaacaag |
| 4801 | tgatggtgca tgactgctga ggctaagtca taagaaatct tgcagctctc atcctgcttt |
| 4861 | ctttgaatgt gctattggga cccctaagcc attaggttga aaaaaaaaaa ggtctgacta |
| 4921 | ctctgagagg ctatgctaca agaagtccat gttaacttca cagacagtga agagagaaag |
| 4981 | cgcaagagag cacttgcaca agaaagagca cacatgcctg gccagtcttc agcaatgcca |
| 5041 | gccaccccag cccagagcca gacctgaggg gcaagaagcc atcctagcca tccagccagt |
| 5101 | tcagctttca gatagctacc cactgggctg caaccatatg aggaatgcca agcaagaatg |
| 5161 | tctagccaag accagttaac ccacaaagcc atgaaaacta ataaaaatac attcatattt |
| 5221 | caaagtatta ggtttgaagt gatttcttac atagcaataa ataaccagaa cagatacata |
| 5281 | tgaggattaa atgagaccat atatgcaaag cacttaaaac aacaaatggt acaaagttga |
| 5341 | agataagtag gtatcagaca gtaaagatga cagtgacaat gatcattatg ataatcattc |
| 5401 | tattatacta atatttaaaa aaattctctg gtttgtcatt tgtttttaaa atatatatgt |
| 5461 | tatatttcct ttcaattgca tcacagcact ccatgtctca gggccaaaat gctgtaattg |
| 5521 | cttcttagct catcttcttg cccctggctt ttccccttct agtctcatat tgacctctac |
| 5581 | tgccagatca attttcctca aatccagccg cagcctgtta cttcaaagct agtaatgcct |
| 5641 | gcttcatcac atccctctgt aaattccaga ctgccatatc tgaccttaat ccccaacgcc |
| 5701 | aagcctattt tcagctgctc tattacattt gctctgttcc tgaaagacta gtaYtcctcc |
| 5761 | aYcttcacca tacagctgac aatcccatct ctgtcttacc aaattctcgg cctaaaatac |
| 5821 | cctccttctt ctactctgcc aacctcaaac tggttttctc agtcagattt aaatcattca |
| 5881 | aagtacatct taggaccaaa tattccagcc tttttccaaa ttctaacgat tctacatctg |
| 5941 | ccccttcatt caatatttat taagctYcta cYctatgtca ggcactgcct gagaaagaga |
| 6001 | aacaaagctt tctcacctgc agcttatatt ccaaaactaa gttaataaat acataatacg |
| 6061 | tcatggggtg ataagcacaa tggagagaaa gaagggataa ggattacgga tagaggttgc |
| 6121 | tataaggtga tcatggaaag cccctctgat gagatgacgt ataccaggag atctgaagaa |
| 6181 | aggaaacaag ccatgtggat tgcggggtga gaggtagggt agagaaggga aaaccaagtg |
| 6241 | aggaatggca aaagcaaagg cctcgaggca aaacatactt ggtgaggctc cctgaagaac |
| 6301 | aggtggaagt gtcataccac ttgtcattta aatgcaaatt acactctgca gtcaggctca |
| 6361 | ctgccttccc cctcctttaa aaaaaaaaaN atccatccat ccatcaattt tattctttga |
| 6421 | caaacttaag actcagttac tttttacttt ttataacaag tattcatcct gaaatgaaat |
| 6481 | tcctaaatac acttccttca taatactgta ctgaatacat ataggctaaa tactccctac |
| 6541 | atagatttaa aaaaaaaatc agtataatgg cttatcagtg aaataaagga gaaatgagta |
| 6601 | atttctatca aatactacaa aatataaata cttgtacaca actacatttt aaaaagtagt |
| 6661 | caaaaactac tataactgat tagctgtgtg accttgggga agctatttaa atttcccata |
| 6721 | cttcagttta ctcacatgga aaatgagaat aatagtttct accttacagg gttgttgtga |
| 6781 | ggattaaatt agtgcatata cataaggctc ttagaacagt aagtgctatc taagggtttg |
| 6841 | ctatgatttc tcttatgggg agaattacca caaaagtaac agtagcatga aaatgaatac |
| 6901 | aggggtgtta tgttagaaaa attttccttt ttcctgatat gatgaatgat tctttgaaag |
| 6961 | gtttcaaatg taacaaagtg ccaYcttcac aatatacact attgctgcat tactagaaaa |
| 7021 | tttggtgtgg attaaaacca tgtaaaaata tttaatactt atacgtaaaa agtagttggg |
| 7081 | ttctaggctc agagaattat aaatgcattt tgttttttca cctatgtgaa tagctgctgg |
| 7141 | gactttttgg aagttgtgtg ggacacacag caaacctccc tggtgaaagg ctgtcccatg |
| 7201 | tatcccagga catctagcct ccctggcctc tgcYcaccaa gcaccaggag tactccccag |
| 7261 | tcactgtccc ctgaaatttc ctgaatgttc cccagtgtta agaatcactg ttctattttt |
| 7321 | ttcaactgtc ttcaactttg actcctcatc cagggtggag gatctttgag gccagaaaag |
| 7381 | tatcttatta tgtccctgta tttctcaagg tagtgtacta ttgccacaaa aagattgttg |
| 7441 | gctgatgcag atgcaaaaca tcaatatttt tatactgatt ataggtgaca ggaaaggaca |
| 7501 | agggttttca ccctcagcaa aatcatcaaa aacatttaaa acagattaca tatagtagat |
| 7561 | aatactcctt gtcttaaaac attatgcaga aacacacata cagtttccct tccctctaaa |
| 7621 | atctgcagcc tcttctccct gctgaatgtg agtgatggtc ccttcattca acagacttct |
| 7681 | atttggcaac tattatgtgc caggcattct aataggtgct ggatgtgaaa ggatttaact |
| 7741 | tattcaaata agtccctaat ttgctgcaat aagggagatt atttaatcat attgagtaaa |
| 7801 | aagtaccaag gaaagtttcc atatttctag ggaataagaa atcttttcaa aaatctctga |
| 7861 | gccaaattaa aattcatttc attttcccta atctccattt ctaggagact agaatctcct |
| 7921 | tcctattgcc acggtagctg ctatctgcag agagaatcta gataatttag aagagaaatt |
| 7981 | tgaatagagc cagagagata caattcttat agtcagactt ggcttcacca aatttaatga |
| 8041 | agaaacttta ataagttaca acatttacta ggcacctact atgcacaaag aactttacat |
| 8101 | acctcatttc taatcttggc aacattctga taagataaat attatcccta ttttaacatg |
| 8161 | aaaagatgga ccttcttaca tattcaataa cttgcKccat aggtgacagg attgaaatgc |
| 8221 | aaacccagtc cttgctctta atggtgtatg acagctcatc atataattag gctgatgcaa |
| 8281 | actctatgat aaacagtatg aatctaggag tggatttgtt tatcctcaat ctttttgcta |
| 8341 | actttacagt gccttgaatt aaagaatcRt ggttactatc accatggtca gatctctgga |
| 8401 | cagggtgagg aagcaggtgc ccacaggcag acagccctgc catatagtga gacacgctta |
| 8461 | tgtttgggag cgctatgtga acaacacaca gctgccctca tatgcagatg taatgatgac |
| 8521 | gacacattca gacaaggaac tgaggtccag aaaagttctg acaacacaac ttgagggaca |
| 8581 | gcgttacagc tagagctcag gtttcttatc tgtaatccac tgctctcaaa tgcccaaatg |
| 8641 | attttatata catatatgca agtgtgtttg ttgaaataga aaaaatagtt tcttggcctg |
| 8701 | gtgaagtgcc tcatgcctgt aatcccaaca ttttgggagg ccaatgcggg aggattgctt |
| 8761 | gaggccagga ggtcgagacc agcctgggca acatagagaa accaccgtct ctacaaaaaa |
| 8821 | tttaaaaatt agccaggtgt ggtggcatgt gcttgtagtt ccagatacta ctgaggtggg |
| 8881 | aggtgggagg tgctgaggtg ggaggatggc ttgaggccag gagtttaagg ctgcagtgag |
| 8941 | ctatgattgc accactgtac tccagcctgg atgacagagc aagaccttgt ctcaaaaaag |
| 9001 | aaaaaaaaaa ttcccataat gttcagttag ttctcttttt cagacttttc ctagaaatac |
| 9061 | ccctcagaat ttctagaggc cacttccctg ctattccttg ttttctcagt ccttaccaga |
| 9121 | tacccaagca attaacaatc tttttgaact atttcagtac atttcaggat atttgaaatt |
| 9181 | ctgctgatgg agctgaactg ctgatacatt aacacatgct gtcattattg actttgtaac |
| 9241 | agaggtcaag agagaaaaga tgcatttttg aatagggaaa aacaaaacta aattatgggg |
| 9301 | aaactaaggc tcagagaggt caagttgtct tgctcaaggt cacaaagcca gtagtaagta |
| 9361 | acagggccag gatttgaacc cagactgtct ggtttcagag tactctaaat tgccaaaaaa |
| 9421 | agaaaactat ttcaggcatt attttatatt tagcctagag cctacataat agatccgtta |
| 9481 | atataatcaa ttctaagctg tatattatat tactgtgttt gaaatattta agaaatattg |
| 9541 | tttaaaataa gtgtattagc tcttRgacct ctccaacata aggagttttc caggcagtag |
| 9601 | cactgtttgc agtaggactt acattattgg aaaatatttt atcctataat caatctacat |
| 9661 | ttattttaca cctttcacct taaaattaaa agtcgtggta gttattaatc aagaagcaaa |
| 9721 | tctatataac gtggtctctc atatatccag tactgttcag cttgaacaaa tgcaaatcta |
| 9781 | atttttaaat gtcccttgaa gaattctgag gcaaagttaa acttcaagta ttaaacagaa |
| 9841 | tagccacaga aaactagtgt ttctcagcct ccctttgctt tcaaatgcct taaaaatatt |
| 9901 | ttagaggcag acaataatct agaattgatt cataaccaat attttacata acagaatgtt |
| 9961 | acatgtattt tcatattata aaaactatac tttctttgat taatgctagt attctgaaaa |
| 10021 | catcgttagt gccagtaaat ccactaaatc tgtttgtatt tactgccctc tagtgataat |
| 10081 | ggctctacat ttgattaaga aaaaactatt cctttcagta aatgaaaaca tctcttgtaa |
| 10141 | gttttatgga gatttgagat taagaggaac tccaggctgc ttttttaaaa ccaaataatc |
| 10201 | atctgaacaa gctgagaatc gttctctaaa tgatcttatt ttaatttttt tttaacaaaa |
| 10261 | aagtctcatt taaaatagta aacacctgca acatgtatgg agaaaggaaa ccatttttgc |
| 10321 | taagaggctc cttgaagctg aaataacatg agactgatct gatagctgta tttatatttc |
| 10381 | tcttctacat gggctaactc tcttattaga tgttagcata gtattctgta attgttgata |
| 10441 | cagtttgaat tcatatatgg tagagacaga gttttgtata actatttagt caatttacct |
| 10501 | aaaaccagca gcagcagcat atctactaca gacttttgtt tcactgaaga ataatcatga |
| 10561 | caataaatgg gtgcaaaaac ttcacataaa tgaagcctcc acaaaaataa tcttgtatga |
| 10621 | aaaagtattg tctccttata gagaaaatta ggatctccaa ttcacttaaa ttggcctaaa |
| 10681 | tgaataccat aatcatcata aaatagttac taatgtcccc tctgtacttc gtggtatgct |
| 10741 | ttgtggaaac aatttaaaca aagagaatat ctgtctccta aagtaataat aactagtgta |
| 10801 | aataggcatg cttccagaaa tatataatct tttacacata tcactttaat atgtgcatct |
| 10861 | taaaataatt ttaagtaata aaatttgagc tataaaagag aaatgatatt cttttcaaca |
| 10921 | aagaatgctt gaacaattga gcatccactc ataaaacaag aaacttcaac ctttatcctg |
| 10981 | caccacacta acatctactt gaaatgaatc atagaactaa atgtaaaatc taaaactaaa |
| 11041 | gaacttctag aagaaaacac agtagaaagt agttgtgatc ttgYgttagg caaagatttc |
| 11101 | ttaaaccaca aaagcatgaa gcataaaata aaaaatggta tactggactt taYcaaattt |
| 11161 | ctctttgaaa aaaactgtta agaaaaYaga acaacaagcc acagacttga gaagggaata |
| 11221 | tgtacaaaat gcatatcaaa taaaggactt gtatccagaa attatttttt aaaaaatctt |
| 11281 | tacaacacaR taagaggaca atccagtgaa aagatggtca aaagatttga acaaacaaac |
| 11341 | acttcataag aatcaaaaag atcaataagc atgtgaaaag atccaYgacc atcattagac |
| 11401 | attagggaaa caaaaagtaa aaccacagtg agatgccaca Ytacatactt actagaatgt |
| 11461 | ataaaataca aaatacaaac aatacaaaat gctggcctgg atgcagagca aattaaattc |
| 11521 | tcatacattg ctagtgagaa tgcaaaatgg tatagaaact ttggaaaaag gtttgacagt |
| 11581 | ttcttataaa gttaaaaagt agagtgacca tatgacccag caatcctact tctaagtatc |
| 11641 | tacccatgag aaatgaaaac atatgtctat ataaagacct atatgaaaat gtttatagca |
| 11701 | actctctata gcagaaaccc agaaacagtt cagatatcag tcaactggtg aatgggtaaa |
| 11761 | caaattgtgt ccataaaatg acatactgga aaaaaatgaa atactaaaaa gcaataaaat |
| 11821 | gaaacaaatt accaatagat gcaataacac aaaatgtatt ataagtgaaa cttataattc |
| 11881 | aactcaaaac tcaaaagtat tgtaagtgaa agaagccatt cacaaaaggc tatatcttta |
| 11941 | atgtattatt cattctggca aggcaaaacc atagggacaa tcagcactgg acgtggggtt |
| 12001 | tggggaatga ctataaaaag caagagaaaa ctttttgggt ggtataaata tcctatatta |
| 12061 | tatagtacat atatattata attacacatt acctatatat ctagattatg gtggtggtta |
| 12121 | tccaattgta cacatttgtg aaaatgcatt caactatacc tctagaaaga gtaactctta |
| 12181 | tgtaaattat acctcaaaaa tctaactttg aaaaatatta gctgatgtta tcaaattatt |
| 12241 | tcaattccag atttgcttaa ctttacaact ttgcccaaag ataaatgcaa aacaaaaacc |
| 12301 | tcaggcatag ttatgtatga taaaacacca tttttaccct ttcaaagagc tccaccatta |
| 12361 | tttcccagaa aaYaggcata cagttatcca aggtccacat tagctttaat gatacaacat |
| 12421 | tcagtgaatt cccagttgtg aaaagccttt aggttggcag ggcgctgtgg ctcatgcctg |
| 12481 | taatcctagc actttaggag gccgaggcag gcagattgcc tgagctcagg agtttgagat |
| 12541 | cagcctcggc aatatggtga aaccctgtct ctactaaaaa tacaaaaaat tagcagggtg |
| 12601 | tKgtggtgca ctcatgtaat cccagctact cgggaggctg aggcaggaga attgcttgag |
| 12661 | cccgggaggc agaagttgca gtgagctgag atcgcgccac tgcactccag ccggggtgac |
| 12721 | agagattctg tctccaaaaa taaaataata agagaagcct ttaggtgata aaataatagt |
| 12781 | caaagtattc ttttaagtat tattatttta ttttttttta attctttgta ataaaaagtt |
| 12841 | ccataaagta aaatattgtc cttttttgtt ttatttttat ttgtatcaat tcaaggggac |
| 12901 | aggtgcagtt tgttacctgg acctgatttt taaataaatc aaactcagtt tagttatttc |
| 12961 | atggtgatcc tgggagactg tttgtcagtc atcatcgaat agcgaatgag tatcctttgt |
| 13021 | atgctcattc taggctgtaa gtaccatgtc agctgatgga gacacaaaaa tccaataaag |
| 13081 | taggtatagc tgggggaggt tccaagatgg ccaaatagga acagctccag tctactgctc |
| 13141 | ccagcatgag tgatgcagaa gacgggtgat ttctgcattt ccaactgagc tttgaaaaga |
| 13201 | gtagtggatc tcccagcatg aagtttgaga tctgagaatg gacacactgc ttcctcaagc |
| 13261 | gggtccctga cccccgagta gcctaactgg gaggcacctc ccagtagggg ccaactgaca |
| 13321 | cctcatacag ccagatgccc ctctgagatg aagcttccag aggaaggatc aggtagctac |
| 13381 | atttgccgtt ctgcaatatt tgcggttcgg cagcctctgc tggtgatacc caggcaaaca |
| 13441 | gggtctggag tggacctcca gcaaactcga acagacccac agctgagggt cctgactgtt |
| 13501 | agaaggaaaa ctaacaaaca gaaagggcat ccacaccaaa accccatatg tacgtcacca |
| 13561 | tcatcaaaga ccaaaggtag ataaaaccac aaagatgggg agaaaccaga gcagaaaagc |
| 13621 | tgaaagttct aaaaatcaga gctcctcttc tcctccaaag gaatgcagct cctcaccagc |
| 13681 | aacggaacaa agctggacag agaatgactt tgacaagctg agagaagaag gcttcagacg |
| 13741 | atgggtaata aacttttccg agStaaagga ggatgttcaa acccatcgca aagaagctaa |
| 13801 | aaaccttgaa aaaagattag acaaatggct aactagaata accagcatag agaagacctt |
| 13861 | aaatgacctg atggagctga aaaccatggc atgagaacta catgatgcat tcacaagttt |
| 13921 | cagtagccaa ttccatcaac tggaagaaag ggtatcagtg attgaagatg aaatgaatga |
| 13981 | aatgaatgaa atgaagcaag aagagaagtt tagagaaaaa agagtaaaaa taaatgaaca |
| 14041 | aagcctccaa gaaatatggg actatgtgaa aagaccaaat ctacatctga ttggtgtacc |
| 14101 | tgaaagtgat gggagaatgg aaccaagttg gaaaacactc tgcaggatat tatccaggag |
| 14161 | aaattcccca acctagcaag gcaggccaac attcaaattc cagaaataca gagaatgcca |
| 14221 | cgaagatact cctcaagaag agcaactcca agacacataa ttgtcagatt caccaaagtt |
| 14281 | gaaatgaagg aaaaaatgtt aagggcagcc agagagaaag gtcgggttac ccacaaaggg |
| 14341 | aagcccatca gacttacagc tgatctctca gcagaaactc tataagccag aagagagtgg |
| 14401 | gggccaatat tcaacattot taaaggaaag aattttcaac tcagaatttc atacccagcc |
| 14461 | aaactaagct tcacaggtga aggagaaata aaatccttta cagacaagca aatgctgaga |
| 14521 | ttttgtcacc accaggcctg ccttacaaga gctcctgaag gaagcactaa acatggaaag |
| 14581 | gaacaaccag taccagctac tgcaaaaaca tgccaaattg taaagaccat caaggctagg |
| 14641 | aagaaactgc atcaactaat gggcaaaata accagctaac atcataaaga caggatcaaa |
| 14701 | ttcccacata acaatattaa ccttatatgt aaatgggcta aatgttccaa ttaaaaaaca |
| 14761 | cagactagca aattggataa agagtcaaga cccatcagtg cgctgtattc aggagaccca |
| 14821 | tctcacatgc agagagacac ataggctcaa aataaaggga tggaggaaga tctaccaagc |
| 14881 | aaatagaaaa caaaaaaaag caggggttgc aatcctagtc tctgataaaa cagactttaa |
| 14941 | accaacaaag atcagaagag acaaagaagg ccattacaaa atggtaaagg gatcaattca |
| 15001 | acaagaagag ctaactatcc taaatatata tgcacccaat acaggagcac ccagattcat |
| 15061 | aaagcaagtc cttagagacc tactaagaga cttagacttc tacacaataa taatgggaga |
| 15121 | ctttaacacc ccactgtcaa cattagacag atcaacgaga cagaaaatta acaaggatat |
| 15181 | ccaggaattg aactcagctc tgcaacaagc ggacctaata gacatctaca gaactctcca |
| 15241 | ccccaaatca acagaacata cattcttctc agcaccacat cacagttatt ccaaaactga |
| 15301 | ccacatagtt ggaagtaaag cactcctcag caaatgtaat agaacagaaa ttataacaaa |
| 15361 | ttttctctca gaccacagtg caaagtagaa gttgggatta agaaactcat tcaaaaccac |
| 15421 | tcaactacat ggaaactgaa caacctgctc ctgaatgact actgggtaca taatgcgatg |
| 15481 | aaggcagaaa taaagatgtt ctttgaaacc aatgagaaca aagacacaac atactagaat |
| 15541 | ctctgtgaca catttaaagc agtgtgtaga gggaaattta tagcactaag tgcccacaag |
| 15601 | agaaagcagg aaagatctaa aattgacacc ctaacatcac aattaaacga actagaaaag |
| 15661 | caagagcaaa tacattcaaa agctagcaga aggcaagaaa taactaagat cagagcagaa |
| 15721 | ctgaaggaga tagagacaca aaaaaacctt caaaaaaatc aatgagtcca ggagctggtt |
| 15781 | ttttgaaaag atcaacaaaa ttgatagacc actagcaaga ctaataaaga agaaatgaga |
| 15841 | gaagaatcaa atagatgcaa taaaaaatga taaaggggat accaccacca atcccccaga |
| 15901 | gatacaaact accatcagag aataacacct ctacacaaat aaactagaaa atctagaaga |
| 15961 | aatggataaa ttcctggaca catgcaccct cccaagacta aatcaggaag aagttgaatc |
| 16021 | cctgaataga ccaataacag gttctgaaat taaggcaata attaagagcc taccaaccaa |
| 16081 | aaaaagtcca ggaccagaca gattcacagc tgaattctac cagaggtaca aagaggagtt |
| 16141 | ggtaacattc cttctgaaac tattccaatc aatagaaaaa gagggaatcc tccctaactc |
| 16201 | atttgatgag gccagcatca tcctgatacc aatgcctggc ggagacacaa caaaaaaaag |
| 16261 | agaattttag accaacatcc atgatgaaca tcgatgcaaa aatccttaat aaaatactgg |
| 16321 | caaaccaaat ccagcagcac atcaaaaagc ttgtccaccc taatcaagtg ggcttcatcc |
| 16381 | ctgggatgca aggctgcttc aacatatgca aatcaataaa cgtaatccat catataaaca |
| 16441 | gaaccaaaga caaaaaccac atgattatct caatagatgc agaaaaggcc tttgacaaaa |
| 16501 | ttcaacagga cttcatgcta aaaactctca ataaattcgg tattgatggg atgtatctca |
| 16561 | aaatagtaag agctatttat gacaaaccca cagccaatat catactgaat gggcaaaaac |
| 16621 | tggaagcatt ccctttgaac actggcacaa gacagggatg ccttctctca ccgctcctat |
| 16681 | tcaacatagt gttgaaagtt ctggccaggg caatcaggca ggagaaagaa acaaagggta |
| 16741 | ttcaattagg aaaagaggaa gtcaaattgt ccctgtttgc agatgacatg attatatatt |
| 16801 | tagaaaaccc catcatctca gcccaaaatc tccttaagct gataaacaac ttcagcaaag |
| 16861 | tctcaagata caaaaccaat gtgcaaaaat cacaagcatt cctatacacc aataacagac |
| 16921 | aaacagccaa atcatgagtg aacacccatt cacaattact tcaaagagaa taaaatacca |
| 16981 | aggaatccaa cttacaaggg atgtgaagga ccttttcagg gagaattaca aaccactgct |
| 17041 | caacaaaata aaagaggaca caaagcttat agataggaag aatcaatatc atgaaaatgg |
| 17101 | ccatactgcc caaggtaatt tatagattca atgccatccc catcaatcta ccaatgactt |
| 17161 | tcttcacaga attggaaaaa ctactttaaa gttcatatgg aaccaaaaaa gagcccgcat |
| 17221 | tgccaagaca atcctaagca aaaagaacaa agctggaggc atcatgctac ctgacttcaa |
| 17281 | actatactac aaggctacag taaccaaaat agcatggtac tggtacaaga acagagatat |
| 17341 | aggccaatgg aacagaatag agccctcaga aataatacca catgtctaca accatctgat |
| 17401 | ctttgacaaa cctgacaaaa acaagaaatg gggaaaggat tccctattta ataaatggtg |
| 17461 | ctgggaaaac tggctagcca tatgtagaaa gctgaaactg gatcccttcc ttacacttta |
| 17521 | tacaaaaatt aattcaagac ggattaaaga cttacatgtt agtcctaaaa ccataaaaac |
| 17581 | cctagaagaa aacctaagca ataccattca ggacataggc atgggcaagg acttcatgtc |
| 17641 | tgaaacacca aaagcaatgg caacaagagc caaaattgac aaatgggatc taattaaact |
| 17701 | aaagagcttc tgcacagcaa aagaaactac catcagagtg aacaggcaac ctacagaatg |
| 17761 | ggagaaaatt tttgctatct atccatctga caaagggcta atatccagaa tctacaaaga |
| 17821 | acttaaacaa atttacaaga aaaaatcaaa caaccccatc aaaaagtggg tgaagtatat |
| 17881 | gaacagacac ttctcaaaag aagacattta tgcagccaac agacacgtga aaaaatgctc |
| 17941 | atcatgactg gccatcagag aaatgcaaat caaaaccaca atgagatacc atctcacacc |
| 18001 | agttagaatg gcaatcatta aaaagtcagg aaacaacagg tgctggagag gatgtgaaga |
| 18061 | aataggaaca cttttacact gttggtggga ctgtaaagta gttcaaccat tgtggaagac |
| 18121 | agtgtggcaa ttcctcaaag gtctagaact agaaatacca tttgacccag ccatcccatt |
| 18181 | actggatata tatccaaagg attataaatc atgctgctat aaagacacat tcacatgtat |
| 18241 | gtttactgca gcactattca ggatagcaaa gacttggaac caacccaaat gtccaccaat |
| 18301 | gatagactgg attaagaaaa tgtggcacat acacaccatg gaatactatg cagccataaa |
| 18361 | aaaggatgag ttcatcatgt cctttgtagg gacatggatg aaactggaag ccatcattct |
| 18421 | gagcaaactg ttgcaaggac agaaaaccaa acaccgcatg ttctcactca taggtgggaa |
| 18481 | ttgaacaatg agaacacttg gacacaggat gggggaacat cacacactgg ggcctgttgt |
| 18541 | ggggtgaggg gagtgggagg gatagcatta ggagatatac ctaatgtaaa tgacgagtta |
| 18601 | atgggtgcag cacaccaaca tggcacatgt atacatatgt aacaaacctg cacattgtgc |
| 18661 | acatgtaccc tagaacttaa agtgtaataa aaaaatWaaa aaagtagata gtcccaaccg |
| 18721 | ctgtattctt tttgaatcct tttgccactg tttcatatca cagttttttt ttttttctga |
| 18781 | gccctagatt atcagtctgt tctttttttt tttttttttt tttaatgtag tccataggaa |
| 18841 | tctgctgcct cacRgtcagt atcgtgcccc ttaccccaat tctaatatga caggtttttg |
| 18901 | tctaagacag catttcctag aatgtgttgt aatgtacagc agcttcatgt gataattctc |
| 18961 | aaagactccc actgtcaaat gttagcatat tcaaggctct gccaggacct gtaatacata |
| 19021 | ttctttcttt attctgttta acttagcatt tctgaaacct atcttactac tgaactcttg |
| 19081 | acatttatta acaaacaaat acaaacRaaa ataccagggt tccaagtaaa attettatat |
| 19141 | aaagcaaagg gctttaaaca tcagagtttt ttagaatggt tattcactca tgcactcaac |
| 19201 | aaacacttat tacatagtat gtgccagcat aggggataca gtaataaaca aaacagacaa |
| 19261 | gttccctgtt catgtaaacc ttggacttat ggggcaaaaa gacaataaaY aagcagacaa |
| 19321 | aaaaaaatta caaacactct caatgaagga aaagagggta acatcgtaca ttgatggggg |
| 19381 | actataaaat taagtagtaa ggaaaagctg cacttgagaa ggtggtattt gggaagagac |
| 19441 | tcgaatgcct agaataagcc aaccagattt ggggcacagc actctcaaca aaggctgagt |
| 19501 | aacacagcca gtctgaggga ggacaggtct acggaatgag agccgaggca agtaaaggca |
| 19561 | acatcacgtg ggtcctgagg gtatgagcct tccagagggt gtgaggatac cattagaagg |
| 19621 | ttctgagcag ggaatgatag gatgtgattt acattttgta aagctgtctc tgtagaggat |
| 19681 | agtttgtaaa agtgcttgag gcaaaactga caagacttga agacttgcac aacagaactg |
| 19741 | aagaaatgag aagaatcaac tcctagactt ctgggatgat caatgtctag gatggacatt |
| 19801 | ggtgccattt gcaagatgga gaagaccggg ggaggtacgg atttaaagga gggtatgtaa |
| 19861 | ggagaaagaa gaatcctatg agacaagacc agaacatgta aatacatgaa gttttggatt |
| 19921 | tcttactctt caaagacatt ttacctcctg tccccgaagt tcttcacaga gttcaggata |
| 19981 | agaaaagctg ccagacagtt gagttttgaa taagtagtaa ctttcaaaca cttgaaagac |
| 20041 | attatattag aatagactac atccatcaaa ataNttaaaa atgtttttag aatagtccaa |
| 20101 | taatttggaa tatgaaagcc taagaaactt ccttatccaa ggccRcataa tataaccaaa |
| 20161 | attagaattt agtactccta gttggcaata tttttatgaa attactgttt tactaagaca |
| 20221 | ttttagaaat gaagacttta ctgaaggcaa taataagtgc aattaaaagt ggtacaataa |
| 20281 | Kaagacttct ttttcatttg caacaggtta gtagtgtatg agaattatga gatgtaaaat |
| 20341 | agtgtagagc ataggcttct ctagttggct tcatgtgagt tcgaatcttg gccctgcctc |
| 20401 | tcttaccagc aatgaaatat gcagcatttt acttaaggat actgggttgt atggagagaa |
| 20461 | tcagagttaa ggttggtgat ccagcagtgt catgtgtcag gagctaataa attgtattgt |
| 20521 | gaccagaaac actgaaactt gttataagga aagcaatcta attaaaacag ctgcattaaa |
| 20581 | atttctacaa tatcttccta acagcttatg ctatcaacag tttgtaaact atcagaatca |
| 20641 | cggatactgg ctgagaatgc ttttggagat ttcaaattgg cataattttc tcagaatgca |
| 20701 | ctgatctgac aaatgtacag acaggcagac aggaatacta ccactcttca tgaataactg |
| 20761 | tctgcctctc ctggatttct tccatgttgt gtaagtctat tacactttgg gtgaatgtag |
| 20821 | ctttagtaca ttgagttaat atcattcttg caaagaagct ctttataaat tccttaaact |
| 20881 | taatttgact ctggacacaa acaaatgaga acaaaataca gctcaaggat taagatcctt |
| 20941 | aaccaaatat gtaaaaaaca cgaaaagcct tacaaacagt gatcaacagt taaacatgcg |
| 21001 | ctatcacctt cccctaacag ctagggaagc atgtatatga atggaaeata tgaacttcca |
| 21061 | tttggtgtac taagaaaaca catcacgcag atggctttta tagcttccca aataaggttc |
| 21121 | taataattca caaaagtgtt gttccctaaa acccataata aacaataata aaacctaatg |
| 21181 | tttattgagg gtctactatg tgtcaaggag agtcctatgt actctcctgg aattacttca |
| 21241 | tttatttcta ataataacct ttaatgagca ctgtcactco cgtttcacag atgagcctta |
| 21301 | aggtcttagc tatcaacttt gcagacaaca cccaagtaaa atcctgcccc ctcttttttt |
| 21361 | tttttttttt aaccagaaat ccagtcctga caactgaaag cttatagggc atttccgctt |
| 21421 | agatacatag ccttacctaa attatatgtc taaaaactta actgtcatat tgtccagccc |
| 21481 | tcccccaata cccaactggc ttctcttcat gattttccaa ctataattct gtccattatt |
| 21541 | caggtttaga atttcatgct ttcttctggc tgtggtcctg ccaagtctta tgtatgctgt |
| 21601 | cacccttctc tgtgcaatct ttctcctact cattcctctc ttttcatcac tatcctattt |
| 21661 | caggccctta tcactcttac acctaattcc ctaacggttt cttcttgctt tcagtacaat |
| 21721 | ttccccttga tataatctat cctgcacact accaccagat ataaccttct aaagtcacct |
| 21781 | tattttagtt tcttcataat attttcctta tagtcaaatg taagggttct tcatgaatta |
| 21841 | taggacaatg tgcaaatggc ttgacctggc atttaagaca gtctgcagta tggcctcaat |
| 21901 | ctacatttct cacacctgcc actggtccta taatcacatc ctctgttcca gagaggctca |
| 21961 | ctcctccaga atgcccacta ccctcctctc cagcaaacat acaataaagc gaatccacat |
| 22021 | gaatacccca tcctaccctg ccttatccag cccctggaat accacctctt ccctattaga |
| 22081 | tgcctatata aatcctcagt attcaagatc cagcttaagg agcacttttt ctgggaccaa |
| 22141 | tcattctggt cctctgtatt gaatactcga actcctctac aggacaggaa cataatgtat |
| 22201 | tattacccta tcattcatta acacacaaca ggcttacatt atatggctgg ttgtattttc |
| 22261 | agaggtatgt ctatatgttt cgctatctat ctatctatct atctatctat ctatctatct |
| 22321 | atctatgtgt ttgaatacag atacataaaa atctcatttc acctataaga acctctggag |
| 22381 | cagatacatg tcatacaata attgggctaa aacaaaaatc cctcagtgaa aacctaaaga |
| 22441 | ctgggttgtg gttgtttgca gccaaaacgt acaaaatgaa aacctcctaa cgatttattt |
| 22501 | tccacatgaa attagtacca gatctagaga aaaatggaca aggatcaaat acaaataata |
| 22561 | aagtcatcac caaactaaaa atttcattca aaagtgatga tgttggccgg gtgtggtgac |
| 22621 | tcacacctgt aatcccagca ctttggaaag ctgaggtggg cagatcactt gaggccagga |
| 22681 | gtttgagacc agcctggcca acatggtgaa accccatctc tactaaaaac acaaaaaaca |
| 22741 | gctgggcgtg gtcatgcacc tgttataccc actactcagg aggctgaggc aggagaatca |
| 22801 | cttgaatcca ggaggtggag gtggcagtga gccgagattg tgctactgca ctccagcttg |
| 22861 | ggcaacagag caagactccg tctcagaaaa ttaaaaaaaa aaaagtgatg atgtcagtaa |
| 22921 | agacccaaat cagggtcata tgtttaacac cagaaagttt gtatttgcta caagacagaa |
| 22981 | accttgacaa aataactttt ctgtgctttg ttacttcatc tgaatgaaga aggtaaacca |
| 23041 | gttgatctca caaatctctt tctaagggct tctggaattt tttttttttt ttaaacaata |
| 23101 | aaaggaaaga gacttcYctt aagcagaaca aagtccgact cctctgtaaa gtggctgaca |
| 23161 | gcaagtggaa aatggaagaa gaacaattac ctgcaaaatg actcattccc ttgtaacaac |
| 23221 | tacactacta gggaattcct tctcttaccg gctgtggcta gcgtcagact catgacaaag |
| 23281 | acctcatcct ggggctagaa ctaggtttag ggttttctca ttcattcctc tgtttctcag |
| 23341 | ctgcattttc atttttaatc tgtgcaatga ttacagaggc ctatgtttgg ttttcatttc |
| 23401 | tagtttcccc aggaagagac aactactatc ttgatattga ttaacacttg aaacttctgt |
| 23461 | taatcacaat ttcagtattt cagggaatca gagaaatcat ttggaagagc cttgaaggtc |
| 23521 | atccagggtg agagaaaagc aaagcacaag caacagacca atgtttagac acagtgaagt |
| 23581 | gaagRcctac aggagaccct ctcaacttca ataagagtct tttttatggc tgtcttcata |
| 23641 | ttctttcaaa gaaatcataa taaaggagtt agtgagagtg taaataaaaa ataggctatc |
| 23701 | atagagtgct gggtaactga gctaaaacta aagtaaacaa actcagtggg ccatcacata |
| 23761 | tgcaagctgg taaggtctca taaatcacca tgactgggta ttgggatttc aaaggcacac |
| 23821 | tctgtaagct ttctcccagc cctgttgatt caagctccaa ttgcactggg ttacttatat |
| 23881 | ggcagcatat aaagttgacc ttttaYgttt aaaaatagtt ccattcctca tccctcctaa |
| 23941 | ggataggcca cagtacctat catatgtccc caccacacta cataatttat gtaagttttc |
| 24001 | acttaatttt caacacaatc ctttgaggta gattatgtta gtcctSattt acagggaaaa |
| 24061 | cagaggctca gggaggccaa atttatttat ttatccaagg ttgcaactct actgtagggc |
| 24121 | agatttatat ccagaagagg aattgcaaag ctcctcagaa tttaggagat ttaaaatgga |
| 24181 | atcaagataa aggttcacat ttttcatctt ctattccatt ttactcttcc agcatctaat |
| 24241 | aataacctat gatatattag aacaaatcag cccatactta ttttgacagt ctcttttcac |
| 24301 | cccatttcag tttgtacctt gctgtctcag agcccatcaa ccacctttcc tcactcccag |
| 24361 | gcagccggtc cttcagggga tggcttggca gttggcccac catcctctgc taccagggca |
| 24421 | tgactcatgg aggcaacagg tgaagctgaY gccaactatt agtgctaaaa aagactcaag |
| 24481 | cctcatgaaa tataccatac ataaatcgct ctccagtcag ctctacccct ccctccattt |
| 24541 | ctacagctga ctgtctgttc ttccttaaac atttacatcc gccactgacc tgtctgggat |
| 24601 | ttctttttta cttcaaggYt ctcctaaagg ttcagtMcaa ccaggtttca ccaaatgaac |
| 24661 | cctgcggtgg aaaggggcag caacgggcat tggtcagttt gcctccagcc aaggaaagtc |
| 24721 | tgactcccct ccttctccca ctcttctctt tctctgcctc acactgccta atacgtcttt |
| 24781 | cctctttctc tctttctttc cttatatctt cattttccac cctattcaga agtgaaactt |
| 24841 | cccttgccac tttgccccca ctaagaaaac agacctccaa cacaacctct taaYaggcta |
| 24901 | attttaaaat catgaacctg cttacacctt ccgtgagttt atcctatatc ttctctatct |
| 24961 | gctgtctgct tcccactaag gttttatccc tccatcccac ctccaaatcc tttacagctc |
| 25021 | agattctcaS atctgcttta gtcacttggt ctcctcatcc cactgaccct attatccttc |
| 25081 | tgtgcacatg ttagagggca catgctcctc ctaggaacta gggccaggtc agttatgctc |
| 25141 | ccatcctgac atgacctaga gaacaaaaaa ggcaaaacga ggtactgtag gattcctctc |
| 25201 | taggaattat actttgctga aattgctctt gctattttgg aatctagtgc tcactaaata |
| 25261 | catttttaaa atattatttg gatatatttt gaaaatacaa ccagaggtcg ggcacagtgg |
| 25321 | cttacgcctg taatcccaac actttggcgg gccaaggtgg gcagattacg aggtcaggag |
| 25381 | ttcgagacca gcctggccaa catagtgaaa ccctgtctct actaaaaata caaaaaatta |
| 25441 | gccaggcgtg gtggcaggcg cctgtaatcc cagctgcttg ggaagctgag gcaggagaat |
| 25501 | tgcttgaacc tgggaggaga aggttgcagt gagcctagat cacgccattg cactccagtc |
| 25561 | caggcaacag tgcaagactc taactcaagg aaaaaaaaaa aagagagaga gagagaaaat |
| 25621 | acaaccagag aataaacact tgttcttcta tctctccatc ttccccacca atacaacatc |
| 25681 | cagaaaatag tcatctttac acttatttag aagcacatag atcttataaa aStttaactg |
| 25741 | agcattaggt tttcatcttt aaaaatattc tgaggctggg tgcactggct catgcacttt |
| 25801 | gggaggccaa ggcaggagga tcacttgagc ccaggagttt gagaccagcc tgggtaacat |
| 25861 | agtgagaccc tgtctctaca aaaaaaaaaa aaaaaagtta aattaaatta aaaaacagaa |
| 25921 | aagccggtct ggtggcacat gcctgtggct ccatccactc aggaggctga ggtgggagga |
| 25981 | tggcttgagc cagggagatc aaggctgcag taagccatga tggcgccact gcactccagc |
| 26041 | ctggttgaca aggtgagaac ttgtctccaa aaacaaaaca aaacaaaaaa cgttttgaca |
| 26101 | tgtagaatac tgtttctggg actaaattag agatttaagg tttgaggtat gagaaaatac |
| 26161 | ctggaatcat gccttacatt agaaggtaag gtaaatactg gtgtttccca atgagttgta |
| 26221 | gtcagattgt tcatatgtat caaacagaca atatactgaa atatttaaaa ataaggctaa |
| 26281 | atagcaacaa ataatttttc ccatgaattc tacttttttt tttttttttt ttgagatgga |
| 26341 | gtctcactca gtcgcccaga ctggagtgca gtggcgccat ctccattcac tgcaacctct |
| 26401 | acctcctggg ttcaagtgat tctcctgctc agcctcccga gtagctgaga taacagacat |
| 26461 | gcaccaccac acctggctaa tttttgtatt tttagtacag gccaggtttt gccatgttgg |
| 26521 | ccaggctggt ctcaaacttc tggcctcatg tgatcgacct cccaaagtgc tgggattaca |
| 26581 | ggtgtgagcc accatgccca gctgaattct actttttttt tttttttttt gagacagagt |
| 26641 | cttgctctgt cacccaggct ggagtgcagt ggcacgatct tggctcactg caacctctgc |
| 26701 | ctcctgggtt caagtgattc tcctgctcag cctcccgagt agctgagatt acagacatgc |
| 26761 | accatcacac ctggctaatt tttgtatttt taggagagac gggatttcac catgttggcc |
| 26821 | agctagtctc taactcctga ccgcgtgatc tgctctcctc tgcctcccaa agtgctggga |
| 26881 | ttacaggctt gaggcaccac gcccggctgc tgaaattcta cttttgaaag aacaaattcc |
| 26941 | ccttctgtag ggactgatga ttcagtctgt aatgatgcat tctcttcatc ttcttttttt |
| 27001 | gtcttttctt ctatatatcc tttaggcatt ctactgtatt aacactagat agaaaaatta |
| 27061 | agatttaggc ccaaacatta tcttctggca taaagtaaac taatcKtttc ctgatgtaca |
| 27121 | ataaataaac agacatattt ctagtagaag attccttatg atttatcaaa acccaattat |
| 27181 | cacttaccct tatggagatc ttagatctta gaaaccatac tgacaatata agattaagaa |
| 27241 | aacaacagaa aatcaaaata tataccaagg ataatgttaa taggtttcat ccttatcaca |
| 27301 | gcatactgtt gaaacttact tgaaatattt ttttaaaaaa gatacaagag gacaagtgtt |
| 27361 | tagtttttaa caagggaggg gactagtcaa caaaYattga ttacctaatt tatgaacagc |
| 27421 | tctggccaaa gtggtcaaaa aaaaaaaatt aggactttag ttttcctaaa cctatcttaa |
| 27481 | tttttaacag gattatagct ttgttcaatc tttacagtct ttagcctctt ttgtgaaatg |
| 27541 | ggtttccttg taaataataa aatgacacct atatatattt aaagcactca tgaaataatt |
| 27601 | ttatctcttt attaaaaact gtgataaccc ttccaatttt gaaatttatt gtcttcctaa |
| 27661 | attcttgcta caaagcctat cattaatatt gcagttcatt ttttccctaa agattgaaaa |
| 27721 | aaacactaac aaatataaag tctttatggt caaagaatgt actcctttta taaaacttgg |
| 27781 | agttgatgta aaggcacaga caacacaagt taccttaata ataaatgcac ttttctttgt |
| 27841 | aattttgggt aattcagtgt gatttgtaat tcttttaaaa gacacacaat cacttgtatt |
| 27901 | tttgcatggt tctttttttc ctaatttccc actatagtga aatatctgtt tttccttctc |
| 27961 | tattgggttt ggattggaat gatcaggtag aattaaatgt aaaataacaa aaggaaaata |
| 28021 | ctttatagat cttctcaaaa tactttgaag ggtataatct ctttaagatg gctttattca |
| 28081 | tatttaagcc aaaaacaaaa agcaaccaaa acactactgt ttatacaaaa agcagcttca |
| 28141 | aaatcagcca gttattttct gaaatggaga tggcagacat tagcctgcac ttactccaat |
| 28201 | atggcagccg catctttgcc tctttgctat ggacacatcc ccagcaggcc tgtacttect |
| 28261 | actctccaga cctgtttatg acaggccaag gtgtttccta ttatggtgcc tatggctgca |
| 28321 | cagtgcactg cttgtcagta ataaaagcca gaggctgtcc ctatagggat tacagtgcag |
| 26381 | cagaccagag atgctgatgg gaatgcaagc atgccctagg caaacattgc agaatactct |
| 28441 | ctgacaggca aaagccaaca aacacatcct ttcttcccag actagcaggg aaagtattca |
| 28501 | gttatgtcat tttcacttgg aacaaactaa taagaagaat gttattgcta aaataggtag |
| 28561 | agatgagaaa gagcagttta tgaccatgaa tatggcctct atggtttttg cctgtgcact |
| 28621 | acaaactttt aatttaaacg agatgagatt gatctagcat atactatgat aaaatttctg |
| 28681 | agacatgagt atctaaaagc agaactgaga ttaagtgaga aatgctcagg attcctgtca |
| 28741 | ctgaaagaaa aagaaaaaaa cctttcttga aaggcacaaa gtagaatgct cagactctcc |
| 28801 | atctaccaat acaaggtaaa aaacagcatt tgcattaacc aacatcatgc attcttgtac |
| 28861 | taatttatgt gactaactac aaaatgttat attgacactc actgtgtagg gtgtcaggat |
| 28921 | ggccaagtgg tctaaggcac cagacactca ctgggttggg ctaaaaacac Ygtagaagac |
| 28981 | ctcatcagaa caataaaaca gagacacaaa atattgtact aagagttaag agaattacaa |
| 29041 | ataaaagttc tgtggaaagt caaaggtatc caattaggaa agcctgaggt gggagacata |
| 29101 | ggacacccca gatataggat gggaagaaga tgggattaaa aaaaaaggct ttataaagga |
| 29161 | tgtaacattc cagataggcc ttaaaagatg gcttcgatct tttaaataaa actttttgtt |
| 29221 | ttagaacaga tctagattta cagaaaactt gtgtagacat tacagataat tcctatatac |
| 29281 | tctacactgt ttcccatttt taatgtctga ctttagtatg gcacatttgt cacaattatt |
| 29341 | gaaccaatac tgatacatta ttattaaaca aagtccacac ttcattcaga tttccttagt |
| 29401 | tttcacgtaa tttccttttt tctgttctgg atcccatcca ggataccaca taatatttag |
| 29461 | tcctcatgtc tcctgaggct cttcttggct gtaggtatct caggttttcc ttgtttttga |
| 29521 | taaccttgac agttttgagg agtactggtc aaatactggt caagtttcga gggtagaata |
| 29581 | tccctcaact gagatctgtc tggtatttgc ctcatgatta cactggggtt atatgttttc |
| 29641 | agtagggaaa ccacagatta aaagtgccat tttcatcaga tcatatcgag ggtacatgtt |
| 29701 | atcacttatc actgtcaatg ttgaccttga taacctggct gaagtagtga taggWttctc |
| 29761 | cactacagtt tctttttttt ccctttctac actgtactgt ttagaaggaa gtcaatatgc |
| 29821 | acagctcaca cttacggtgt agggggttat gttctccctc cttgagagta gagtatctat |
| 29881 | agaagttatt gggaattccg cacaggagga gatttgtcta ttttccccca cttaggtatt |
| 29941 | tatttaataa attgtatcaa tatgggttta tggatattta ttttaccctt tgggatataa |
| 30001 | tccaatacta tattattttc ttgctcaaat tgttctagct ttggccattg ggagctcttt |
| 30061 | cagtttgctc ttgcaactct tcagtatatt cccacgggtg tagggttcca tttgtttgag |
| 30121 | caggtcctta ctttttggca ctacaagatg ctccaggctc atcttacata tttccttcct |
| 30181 | gagtccctag aaatcagcta ttttttttca aagagtcttg gttcctttta ccagagaatg |
| 30241 | gtattagaaa ccaaaatgag ggtgctaagt gtgctcattg ctactggggt atggtagctt |
| 30301 | ctagaccctc tcggctgata gagcaaggaa atatttgtgt gtatactaga tggtaagatg |
| 30361 | ttgagaggta gaatggagag ttaccttctt aatatacttt tcttaatatt aaatattaat |
| 30421 | aagatattgt gtgcctgggt tactttcagt cttatgcaga ggaagaacgt atgtacattc |
| 30481 | atttatgaaa aacactggct agactattct tctgcactgc attatgcatt tctgctagaa |
| 30541 | aaagctcaga gattttcaga tattctgaca aaaatctcag gcttgcttga tgagctatac |
| 30601 | tgtaaaatta cagaaggaaa caaagggcaa actccttgaa ggatgaaaat aaaggaataa |
| 30661 | aacatataaa acaccaccaa aaaaagtgat taatggggga gaagagtaaa taaaacatta |
| 30721 | taatagtcct ctttggttag tatcaatatt attaggtcac tttatcaaaa ggatagaaat |
| 30781 | caggatggca gacacccttc tctaaccctc accccccaaa ataataaaat aaaaactaat |
| 30841 | gttattcctt cacatatgga aatgaatgag ttctactgag tatctagtat gattcctgac |
| 30901 | tcagtcgaga caattcccat cttttaattc attaaatcac cacagcaact atttaacaga |
| 30961 | tgagaaaact gaagcacaga aggcaacRtg gcccaattta cgtttggtaa aaggcagaga |
| 31021 | atgaatccaa ttcaggcagg ctgtctatag tagggtgctc taaatccacg gaccattctg |
| 31081 | cctaaggaat gaatatttta tgaattggaa tatttctgct gaacgaattt gccattttct |
| 31141 | cctctagtgg agaaatccaa ctgagggtaa agaaggaaaa atgttgattg tttaaaacaa |
| 31201 | taaattagtc tctaaattgt tcttgcagct gatttagact agtgtgtcca aaagtatgcc |
| 31261 | cagtgttagt aaatggtagg caaaatgctt taaggtggtg caagatgaat gttttctcat |
| 31321 | tttgttattc attaatttta gaaaaaatac agaaaaaata taacttgaac atcaaaccta |
| 31381 | tgatttcatg tataccatta cttaagatga ggcacttggg tgagtattta gatttaacaa |
| 31441 | taagttgctc ttagcatttc tatactttga caataaatta tccaaaaaag aaattaagaa |
| 31501 | aataatccca tttgcaatag catcaaaaaa atacttagga gcagccaggc gtggtggctc |
| 31561 | actcctgtaa tcccagcact ttgggaggcc gaggcgggca gatcatgagg tcaggagatc |
| 31621 | gagaccatcc tggctaacac agtgaaaccc catctctact taaaaataca aaaaaaaaaa |
| 31681 | aaggcaggtg tggtggcagg cgcctgtagt cccagctaat tgggaggctg aggcaggaga |
| 31741 | acggcgtgaa cctgggaggt ggagcttgca gtaagccgag atcgcgccac tgcactctag |
| 31801 | cctgggcaac agagcgagac tccatcMcaa aaaaaaaaaa aaNaaaaaac ttaggagcaa |
| 31861 | atctaaccaa caaggtgaaa gatctataca ctggaaacta caagacattg atttaaacaa |
| 31921 | ctgaagaaga cagaaataaa tgaaaagata tcccatgttc atgcactgaa agaattagta |
| 31981 | atgttaaaat gtccacacta tccaaagcca tctatagatt caatgcagtt cctctattga |
| 32041 | ttcaatgcaa ttcctttcaa aattccaatg tctttttttt tcacagaaat agagaaaaaa |
| 32101 | atcttaaaat ttatatgaac caaaaaaaga cctaatagcc aaagcaatct tgaacaaaaa |
| 32161 | gaacaaagct gcaggcatca tattccctca tttcaaaata tattataaag ctactgtaat |
| 32221 | caaaacagca tgttattgac ataaaaacaa acatcaacca atggaacagg atagaaagcc |
| 32281 | cagaagtaaa tccaagtatt tacagtcaat tgatttttga caaagggtcc aagaacacac |
| 32341 | aatggagaga ggacagtctc ttcaaatagt gttgggaaaa ctggatgtcc acctgcagaa |
| 32401 | gaaagaaact gtactcttat ctcacactcc atataaaaat caactcaaaa gagatataaa |
| 32461 | ggcttaaaca taagacctga aactgtaaag ctactagaag aaaatataag ggaaaatctc |
| 32521 | cacaacaatg gtctgggcaa tgatttcttg gataggactc caaaagcaca ggcaactaaa |
| 32581 | acaaaaatag acaaatagga ctacattaaa ctaaaaagta cctgcacaag caaccaaata |
| 32641 | atagagtgaa aagacaaccc atggatcagg agaaaatatc tgcaaaccat acatctgata |
| 32701 | agaggctaat attcaaaata tataaaaaat tcaaacaacc aaatagtaag aaaacaaatc |
| 32761 | gattaaaatt agRcaaagga tctgaaYaga cacactttcc tcaaaaaaga aatatgaatg |
| 32821 | gccaacagag atacaaaaaa aaaaaaaaaa aaaaaaaaca atgttcccca gccctgcaca |
| 32881 | gtggctcatg cctgtaatcc cagtgctttg ggaggctgag gcaggagatc acttgaggcc |
| 32941 | aggaattcta gacaagcctg ggcaaaatag caagaccctc tctatacgaa aaaataaaaa |
| 33001 | gccaggtatg gtggcacaca cctgtagtcc tggctacttg ggaggctgag gcaggatcat |
| 33061 | tgagcccgag aatttgaggt tacagtgaga catgatcaYg ccactgcact ccagcctgaa |
| 33121 | caaaagagca agaccctgtc tcaaaaacaa acgaaaactc aacaatatct ctaattctca |
| 33181 | gggaaatgca attaaaacca caatgagcta tcacctcatg cctgttagaa tgactatttt |
| 33241 | cctttttttt ctcttcaact tttaagttca ggggtacatg tgcaggatgt gcaggatgtg |
| 33301 | caggtttgtt acataggtaa acatgtgcca tgtttgcttc acgtatcatc ccatcaccta |
| 33361 | ggcactaagc ccagcatcca ctagccattc ttcctgatgc tctccctgca cccatcccac |
| 33421 | ccgccaacag accccagtat gtgttgctct ccaccatgta caatggctat gttcaaacag |
| 33481 | atgaatgata acaagtgttg gcaaggatgt ggagaaaagg gagcccttct acactgttgg |
| 33541 | tgggaatgta aattagaacc accattattg aaaatagtat gaaggttcct caaaaatcta |
| 33601 | aaaatagaac taccataaaa tccaacaatc ctacttctag gtatacaccc aaaggaactg |
| 33661 | aaattggtac atcaaaaaga tatttgcact cccatattca tttcagcttt atttacaaca |
| 33721 | gccaagatat ggaagcaatc taagtgttca tcaagtgtgc ataaagaaaa tgtgatatat |
| 33781 | atatatatat atatatatat atattatata tatatatata tatatataga ttatacaggc |
| 33841 | cgggcgcagt ggctcagatc tgtaatccca gcactttggg aggccgaggc gggccgatca |
| 33901 | caaggtcagg agatcgagac catcctggct aacatagtaa aaccccatct ctacttaaaa |
| 33961 | atacaaaaaa ttagtggggc gtggtagcgg gcgcctgtag tcccagctac tcaggaggct |
| 34021 | gaggcaggag aatggcatga acctgggagg cggagcttgc agtgagccga gatcacacca |
| 34081 | ctgcactcca gcctgggcta caaagcgaga ctccacctca aaaaaaaaaa aaaaaaaaaa |
| 34141 | aaaaaaagat tacacagcct tataaaagaa agaaattctg tcattcacaa catcatggaa |
| 34201 | tggaactaca ggacattatg ctaagtgaga taagtcaggc acagaaagac aaatattgtc |
| 34261 | tttaataaat gatctcactt tatggggaat ctagaaaagt cgatctcaga aacagagagt |
| 34321 | agaaaggtgg gttaccagag gctgtagagg aggagggaga gagaaatgga agatgtcgat |
| 34381 | caaacagtac aaaatttcag ttagattgga ggaataagtt ttagtgatct attgcactgc |
| 34441 | atggagaccc cagtaattaa taacgtatta tatgttttac aatttctaaa atagattttt |
| 34501 | gacattctca tcacaaaaag ataaattggt gaggtaatat agatatgtta attagcttta |
| 34561 | ctaaatcttt ctatgatgta cacattttaa aaatcacatt atacccaaga aatagataca |
| 34621 | attaatattt gtcaattaag aataattgac aaataaattt taaagattaa taaaaaatac |
| 34681 | attaagttaa aacattcaac atataatagc agatatgaat gtacacagaa atgacaaaat |
| 34741 | cccagcactg tgggaggccg aggagggagg atcacgaggt caagagatcg agaccatcct |
| 34801 | ggccaacatg gtgaaacccc atctctactc aaaatacaaa aattagctgg gcatggtggc |
| 34861 | atgcgcctgt agtccagcta ctcgggaggc tgaggcagga gaattgcttg aacttgggag |
| 34921 | gcggaggttg cagtgagctg agatcgtatc actgtactcc agcctggcga cagagcgaga |
| 34981 | ctctgtctca aaaatgacaa agtttgagca acattaattt ggactgtaaa ttcttaaaga |
| 35041 | atagaaaagt catgtttttc ttctaagaaa tattatgttt ttacattgca agaaatatgt |
| 35101 | gacacagagt ttttcttaat ctctcttttt tagtatattc tagacaggca agcacatgca |
| 35161 | atttattgag cacccagtgt gtgctaatgc accaaacgga gctttacata cattatagct |
| 35221 | aatggtctca ataacttttt cattttattt tcccctttca ttatcgccac ttataaatga |
| 35281 | aaaaactgag ctccagagcg gtaaggccta ttgcccaaaa tattagatag gaaacaacag |
| 35341 | agctggaatt tgaaaccaag tttgcctaat gaaaaacatt tatgttcttt tcactgtaca |
| 35401 | aagctgctgt aagtatcact ggtgcctact ccaggccagg gagtaaatat cattcatcct |
| 35461 | tatcacatac aaagtataac aaaacaaaaa caagaagctc tgaatactaa ataataataa |
| 35521 | taaatacttt ataaaagata aactattctc taagagtaaa agataataaa cctattgtca |
| 35581 | ttgtagttgg tcactgaact taactaattt cctaatggac gcagcagaat tgtttgttgt |
| 35641 | ttaagcaaat atcaaggcat accccccaat ccctgttaca gggaataaaa aaagtcttct |
| 35701 | tcaaatgcct ttcaaaacta atgtgaatat taaaataaag tgctactgat ctctctacat |
| 35761 | tctagaaaga tctcagacta acagtgtcaa ttaaactatt acaacaaata gccatgtaaa |
| 35821 | aactgctccc ctactagagc tacgctatca caaaattaac cccagcaatc tacagttcta |
| 35881 | gaaaaagagt tggtccctcc tgctgaaaaa gagaaaacca aaccctacat attttgtgaa |
| 35941 | tccactgaaa ataatgacat aaacagcact gcacatccat catgtattta tatcttaagt |
| 36001 | gatagctaca gtctatgtaa ctatcgcaga aatcttctta aactgaacaa aagcattatc |
| 36061 | tatcatcctt tctctctaga aaaataccag tttgtttaat ctacccataa cattagaaaa |
| 36121 | aatacttctt ttatcatggg caatccttat gtttcggaat ttttttcgaa aacgtagaca |
| 36181 | gttcataatg ctctcagaca gaagttacca ctactacccc aaatattaag tcaaaatgta |
| 36241 | actgaaaaaa agaaatttat ctagtaatga ttaatttatt gaataattaa aaattaggag |
| 36301 | tttttgataa ttaaatgttg ggaataatta aactttcact aaatactggc acaggaactg |
| 36361 | aacggatgac aacagagaca agttaagatt tgttttaatc ctaagtttta tgctaaggta |
| 36421 | acatcaaggg ctctactttt cagtgaaaga aaaatttcct ttaaaattgt ttccctcttc |
| 36481 | cattattact taaaagcaaa gaaagtattt tttctaacag tgattatagg attctcaatc |
| 36541 | tttcatatta actttaaggt actacatgta agctacataa atctttccca aatctacctt |
| 36601 | tattgagtag atgaaaaagc agatatcgaa ctcaaaacat ctaaatgttg attttctata |
| 36661 | attatagaag atattttctt ttgaaattta aagtttgtat ttaggcatat taacactttt |
| 36721 | ttaatctaag atttaatatg ttaatgtaga aaacaactga ggctgttttc tctctataaa |
| 36781 | actaacatgc cttttccaat taacttagtt tccttcttag caaaagttta acatttatat |
| 36841 | ctgttgagtt acaYtgtagt tgcataatgt ggaaatatct taagatttag ccacttctat |
| 36901 | gaagatccta tatttgttat aacacccctc ttgcccagaa gaaaatacat caacaaaaag |
| 36961 | tcctactata tgttctgcat tgactattac aaagcagtag ggggagcagc cagagaaagc |
| 37021 | tctgagacaa agcacccagc aaagcaattt aatttatagg caacagaaac atgctagaga |
| 37081 | ggtttgccaa aagccaaata cacaaaataa attccataaa gaagtcatga ccacatttgt |
| 37141 | aaagctggcc taagtatatt tggaatgaag tatagaaaaa tctgaagtct cttagaaagg |
| 37201 | gtctggattc taacttcaag acagactttc agcttgaaac acagtcattt ccagccatgc |
| 37261 | caaacctcaa actgccccca aaattagagc agaaacaaaa tacattttta tagtgatatg |
| 37321 | tcttgggaat aactcaaaat gatttcgttt tctcctttga acctcactga acttacaggg |
| 37381 | aaggcctggt gaaatgtgca ttattaggtc acaagaggat aacgttacag ggttccatag |
| 37441 | cataatcctt gaaagccctg aggcccaggc cgctgtcctg ctctcctctc tactgactcc |
| 37501 | catcctcaat atactttcca tgagagaaag gtaaccaaaa acatggtgaa actattctgc |
| 37561 | ttaaaaggtg ttttactgaa aaggcacatt gaccactaac ccttattaca tttcacatgt |
| 37621 | tctaaaaatt agtaaggtct gcattttcag ttttagagta aaacaggaaa agtacttagt |
| 37681 | tagctcttct gtctggcatt ctgtaactgg aatttaagaa aagcctaaac ttctaattag |
| 37741 | aacttcagaa tgttcatgtc tgtattatac cacaaaaact gtaaatataa tttaagcatt |
| 37801 | tttatgatac agaaatgtgc gctatagaca gttatctaag aattataaaa atccatcaaa |
| 37861 | cttgaagtgt ctggtataaa ttacaaccga atggtaaaaa gacattttag ccacgtaggc |
| 37921 | aaccaatgaa gtttgaccta aaacccaaat aatagcaata acaacagata cagtgcctac |
| 37981 | tattgtcaga tactatatta gctagctctt ttgtatatat tctttKgaac tcttacactg |
| 38041 | acttttcaag atagttatta tggtgcccat tgtatgctaa ggaaactgaa gctaaaaaaa |
| 38101 | attgaagtca tttctctaat gtaactccat tagcaagaaa caaaaccata attcaacttc |
| 38161 | caggtttgcc tgcctccaaa gctttgagac ctcactaaaa ttaccctcaa ttgtagcaat |
| 38221 | gaggttccaa aggaaatctg tacaaatctc aggcagatta atgtgcttat aagggtaaat |
| 38281 | gccatagatt taatcactca aattaaatgc catctggaat ctcttaccct acttggtaca |
| 38341 | agcatcctac atgtgttaca gccaacccta gccttggcca agaattcaat aattttYctg |
| 38401 | cttcaatgcc atcaacaagc aagaaacata tataatacca atacaggaaa tacagctagt |
| 38461 | tgctcctaga gcatcattta aaagctgcta attggctaag atgcctttta ttgagaagtc |
| 38521 | taagaaacag aaataatgtg ttaacccagt ttgttaaatg ggtttgagga atcagtttcc |
| 38581 | tccttcctaa tacctaaatc catctccata ataagtattc tctatcacca tttaaaaatc |
| 38641 | ctgatctctt actagtgttt ttattgtgct tttcaatctR ttagagtaaa ttttttaaaa |
| 38701 | cctcaagaga gaacacagaa aactgtcata atttttcaaa ggctaaagga gaataaactg |
| 38761 | aaaatatcag tttgaacacg tgtatgtaaa aagaatggat ggtaataaaa ctaacaactg |
| 38821 | aaaagcaatg tttctgactc attcattcat actcaagaaa tatcaaataa ctgagtggag |
| 38881 | atgatgcaag ctgtacacat ttccagttca gactgaaggt gtggcaacac tcacaggggc |
| 38941 | cttccgatca gctgctccaa ctcagtttac agcttttgtg gatgtggctt attcatgccc |
| 39001 | ttgttatgaa gaagaagggt aactttacaa cctttagcaa gagctttttt ttctttctgt |
| 39061 | gctaaccctt ttttgtctat aacagtcatg taagcttagc actgatttag aaataaataa |
| 39121 | gttaaagaag acacgaatgg cttggacatt aaaagtttaa gcaacagctt aagctgagct |
| 39181 | aagtttaatg ttaaaaatta gtgtgacagc aataattttt caattcagct ctgtcgtggg |
| 39241 | ctaggaaaaa atatcctaat ttttcagcca caagacataa acattgctag aatgactaca |
| 39301 | ttttgaaaaa attatcttct cactttacct agatttcatt ttaaccaaac agaccaacct |
| 39361 | ctcctattaa acctgtaaat taactcaaag tctaatctgg ggccttcata ataaagattt |
| 39421 | tttttttaaa tccctgtctt atctggtgcc tttaaaagaa aggaatcatt ttaggcaatt |
| 39481 | attatgacct aaaaaatttt taaatcttaa cgtatagatt aattccttga cagctgaagt |
| 39541 | catttacaat acattattaa atttcacatt cagttttaaa tccaaacata gatctcaaca |
| 39601 | ttaagaatat ggattttagg gaaagYaact agctgctcaa attcatttag ctgaaaaact |
| 39661 | actgtcgaat caccttgaaa aYatacacta atgcttgcac attgctaagK ggcttttgat |
| 39721 | tctgctcttc attttcttac acagMatcaa ccacacaata gaattaagaa ctcaggccca |
| 39781 | tggcaaagtg ctcccattta gcagttagga cactggacat attcagcata tgtctactgc |
| 39841 | tattgagaat caaattatga aaacaaacta tattttataa aactaagaat ttgttactca |
| 39901 | Ratgagaata aaggtgccta atgcYacagc agggggtaaa agtcccagta agagagcaat |
| 39961 | aattggtcat tctgatgagg agctgtgcca aatttagaaa tgaggcacaa atgacaaaaa |
| 40021 | aattgatcat cagtgtggac atgggtaggt cagtgtgcat atgggtaggt tagtatctgc |
| 40081 | tggccgtgtc tacagagccc cttttattta tttgaagcca acttttcact tgacaatgct |
| 40141 | acctacaaaa gcactgttaa tagataagac aatcaagtgg ctgttatgcc gtggcctttt |
| 40201 | tgtaaaaact gcatgagaac aggtgggata aaaaccatag aaaggtagaa aaaaaaaagc |
| 40261 | atcactcatt taaagatatg tgcacataga tgaactgtaa gataatataa ccttcttgac |
| 40321 | cttgtaaata ggtggccaaa aatacttaaa tatctKgacg aggcaactat tactaattgt |
| 40381 | ctcacaacat taYcagtcct tactggctga atccttcagc catctgcata cgacatgcac |
| 40441 | aggcaaatag ccactaaaaa catacacaat tccaattatc tccttgcata actaaagaca |
| 40501 | aaaagaacag gaaatccaaa aaatacagca aaactgaaaa cactatacct tgccttccgt |
| 40561 | gctattttaa ggctgtccca ggctgaaggt tacttctcag ccctcaaaac tccattaact |
| 40621 | gccaagacca gcaccttagc acatatggca cagatgccta gttgaagcct ccttgtacta |
| 40681 | aatgacctca aaaaactggg ctttctttcc aagattaatg gaaacaaaag taatgatcat |
| 40741 | aaggaacctt ctaactctgt taatgtttcc tgcggatatg tatggccaac tgaatatata |
| 40801 | aaggctcagt tcttgcgggg taccctgaca actagatgaa ttagggtgaa ggttccaagt |
| 40861 | tcgatgaact cttctgagtt tgagtgccct aggtggtgac attcaagtga tttcacagac |
| 40921 | atccaccaat tcttattttc aaccgggaat cccaagaaca cctttaaaca tgcaatgccc |
| 40981 | atggacccta ctgggtttct gctgcaaggg ctcagtgtta cttaggaacc ctgtgtcttg |
| 41041 | ggagatactt aaatttagca cgtcaaattg cttttggaaa atgtttatct ggcgtgacta |
| 41101 | ggggaggcaa agcaaggaaa caggaacctc cctctaagga gcagaatagc caacatgcag |
| 41161 | taagcctaaa aaacctctca atttatttcc cggggctatg ggtaccagtg gctcgccggc |
| 41221 | atgggaatcR gcagcctggg ggcaccagtg acagcagaac cggggcttac cttgttggag |
| 41281 | gccatctcac tgacggagtg cctggtctgt agggtctcta gctggtccag acaccagtcc |
| 41341 | agctcctcca gggtctcgct ggccagtttc tggtaggcct cctctgcgaa gagacaggga |
| 41401 | aagggggact cagttctcaa gcgcttcacg ggtccgctag cgagttcaaa gggggccatc |
| 41461 | ctgccatacc ccgccatgct cggatgcccg gtgccggcac atgagggctg ctccttcata |
| 41521 | ttgcccagcc cggcagtgca acgggggcgg aggctgtgct cgcggggcgg ccggcctcgg |
| 41581 | ggaggcacgg tctctccagc ttggcgtctc gggtcggcct ccagggaggg cgtgcaaaga |
| 41641 | gcggcgagcc aactttcaca cagcgacgcg agcggaaaaa ccactatgcg acttttcaac |
| 41701 | tgtgcggcgg gcccgagtcc cagtccagga gcYcggctct agcggatggc gagggggtgg |
| 41761 | cgagcgcgct tgggtgcccg ccccgcagag gagcgtctgg tccacagccg gatctcctcg |
| 41821 | gtccccaacc cggagccgcg gccccacgcc cgccccgcct gccgagcctt ctgcacKgca |
| 41881 | cttgaagtga atgaatcagc cgcggccggg tgcgcggcca ccacgtttcc tgttttcttt |
| 41941 | ctcaactcct cgggcggcag gcgcagcgcg gctccaacgc cgcagctttc cgggaacact |
| 42001 | ccccctcacg cccctctcgg ccctcggcgc tgcctggctc ctcctcaacc cccttacgaa |
| 42061 | aagattccga attgcaaaag cctgtccctg tccgtgccac ccgccgcgtc cttcccctcg |
| 42121 | agctctgccc cgggggcccc gccacctcgc agtgccatcc ccccggcgca gccgggcgcc |
| 42181 | actcgctttg aagtgcagac gaggaggcgc gggcgcgagc gtgtgtgtct gtggggctgc |
| 42241 | tgtgggactg tctgtgctag gagagcggcg gaaaacccgg cgtggagcgc ctgcagtccg |
| 42301 | ccgtccgggg tcgcgcccgc cgcggggctc aggagggacc ggcacgcagg cgcgcacggc |
| 42361 | cgcgcacctg tctcgctaga accccgcgcg ccccgccgag ccactgccct ccaggttgcc |
| 42421 | cagaccgctg gagcctctgc gactccacga ccggctgctt cctgcgaagt ttcacaaaca |
| 42481 | aggttattta ggaccctcaa ggtttctgag ggtttaagtt ttagggtttc tgggggttcg |
| 42541 | tttctaaagg cttaggattc acctacttca aggaggcagg gttgtgggaa ttaagaccgc |
| 42601 | attctttttc tacccagccc agtccctact aagtaccaga cttctaaatg ttggggcgga |
| 42661 | cagaaacaag caaacaaaat atacaatgtt gtggggtcgg aacgctttat aattcacaaa |
| 42721 | tttgacaata ggctgcattt tcatatgccg aattgcctaa gagttctctt aaaggaacag |
| 42781 | caatgtgaaa gaaccacatg gtaaggagaa tttacgcatg tcctgcatac taotcctttc |
| 42841 | ccctgtgaat tgcataagac ctagatgatc ttgggccaag gaagaaaatc tggaagggtg |
| 42901 | tttctaccca ccatgtgcag agtacactac aattttgaga aaacggaaag accatattca |
| 42961 | aaggcataca gaaaagcctg ttctgtttac aaaggctgac ccagggcacc agggacactg |
| 43021 | tccctaagca gatcagttgt gggagaactt ttctacatta gcatgcaata agcaaaccat |
| 43081 | tcatagtgag gagaagtcaa actcccaagg gtccatttga taaaactttg tcattgtcga |
| 43141 | gtggaaagaa gatactgaga aacttacact aagtggtggg atcccttgtc tttgtctttg |
| 43201 | aatctacagg tattggagaa gaaattctgc ccttgaaatt tagactccat aaattaacat |
| 43261 | ggcacaacaa ataaagttca tggactgaat ttaggctcct gggatttttg agatagcttt |
| 43321 | ttatgtgaac tttgtaaaag ttagagtaac ttttaaagta gttgttacat gtgccacgtg |
| 43381 | gcttattgtt atcaagaata cttgaactat ttactgttca ctttgagtac tctaggttaa |
| 43441 | aatttgcctc ttttttgttc tacttcctcc accccgcagt ctatgtaaat atatacttta |
| 43501 | gatggacaaa caactgccta aaccttgcca ggtgaattaa agtttcagat tgaaKctttt |
| 43561 | ttttccccct taacaagctt aaagatatta ataattttaa atggtaaata taaaatacct |
| 43621 | gctctgtata gcttccccaa ttctaagaat gtaaaaaata ttacatgctt gttataaaaa |
| 43681 | ttgaagcatt acacacaaat ataggaagtc cattgtaacc ccacacccta aagatcacaa |
| 43741 | acaatacttt cgcctatggc tctaacacaa tcattttcat tttactgaat aacttccata |
| 43801 | tgcaagtata gcatcaccta gttgccatgg tagtgcatct actatatggt ttggttttga |
| 43861 | tattttcctc tctctctcat tcccataata taggaatgta ggaaatttta agaggacatt |
| 43921 | gacttgtttt atgatcattt gagctgtcca tagttagcct atccagtgga ttaaagatgc |
| 43981 | ataaccattg tgtctgggat ttgttcagtg ccatcttttc aatcattggt tacaatgaag |
| 44041 | ctgggagtcc cctctgaggt tcggcKttct gtggctcctc tcccctgcac tccaactttc |
| 44101 | tcaaagcctg agcctcaagt gatttcccag tagYtaagta aactgccccc ttcctccatc |
| 44161 | ttcaccaagt tcccaaagct Kttcagactc aggcttcaaa tctaacagga tgtggctcca |
| 44221 | cacattatat ttcagttgtt attttttaat gtggaaaata attcaggaaa gttttggcta |
| 44281 | atgcttcaag acatcatgca ctttatacac aggatttgtt cttaagaagg tagtatagtg |
| 44341 | acaggaggaa caatttactt cagaatatcc attttatgtc caagccatgc accagccact |
| 44401 | tttgacagac aggatttgag tatgatgata aaatggggta agcatatatt ttaagttcta |
| 44461 | acatctgtat aaataagaaa aatgaaaaat cactggaaca catctacatg ctagtgagaa |
| 44521 | aataattact aacagagtaa agtttgctct gtgaaactgt tgctcaaata aagaattatt |
| 44581 | cttgatatta gcatagagct gagaatattg cttttttcca aattcctagg tgagtaggca |
| 44641 | atatagctag ccacgatttt tcaggatcat ttgtaaagct tcacttttag gaattttaac |
| 44701 | cccaagtgtt ctaagacatc aagtaactga ccttttcatc ccgccgaaca aacctcaaag |
| 44761 | tggagttgcc aactatccca caggaaattg agtcaccaca ccaagcaaca cacctaaatg |
| 44821 | tcgacagcta gcaggacaaa aacagtgagc cagtttaatt ttggctttta ccaagaacac |
| 448B1 | atactgcatt cattaataaa atacttcccc tcaacccctg ccagagtagt atacactgtg |
| 44941 | gctctcctta aaaatacatg aaaactcttt aactgcacca aatcttgcta agtcaaggaa |
| 45001 | ctaaacagag aaaaacaccc aMgcaaaaac tattggctaa actccctaaa ggctgggaga |
| 45061 | gggctatgga acagcaactg agaaataaat tgagccttga aggcccctgc tacaacagca |
| 45121 | tcagttttct tcaaggcacc tttgaactat gtaacacccg cattctgctg aggctcttct |
| 45181 | gtgaacaaac agtcctcaat tcttgdgggc cagcacttgg cttctgtcac agtgatatgc |
| 45241 | ttagaggttc ccctgacaca tggcctgaaa ctgtgccagg ggctccagga gaagatgctg |
| 45301 | aagaagcagc ttccttttga aaaaggaaaa aagtaatcac ctcagagcca cagcagttag |
| 45361 | ctagaggttg aggtcatttt ttgtgaaatg ttcagtccat tactcttacc cacaactcac |
| 45421 | agtgatgttg accattgagg taaaaggatc cactgtacgg gatgtgtaac tatgtggaca |
| 45481 | ttagtttctt tgccaacact tgaaggtctg ctaaaggact gtatcggctt gtcaeaattc |
| 45541 | ctagatagac ctattggtat acatgaagag aacaagtcca aaaaatacca cttattttgg |
| 45601 | acactatttg tatgccctta atttaaaaaa aaaatacaaa ttataacagc tgaggtcggg |
| 45661 | cacagtggct cacgcctgta atcccagcac tttgggaggc caaggcgggc agatcatgaa |
| 45721 | gtcaagagat caagaccatc ctggctaaca cagtgaaacc ttggctctac taaaaataca |
| 45781 | aaaeactagc cgtgcatggt ggcgggcgcc tgtagtccca gctactcggg aggctgaggc |
| 45841 | aggagaatgg cgtgaacccg gcaggcagag gttgcagtaa gctgagattg ggccactgca |
| 45901 | ctccaacctg gacaacagca gaagactccg actcaaaaaa acaaaaaaaa ttataacaac |
| 45961 | tgatccagat tttttttatt attacacttt aagttctagg gtacatgtgc acaatgtgca |
| 46021 | ggttagtttc atatgtatac atgtgccatg ttggtgtgct gcacccatta actcctcatt |
| 46081 | tacattaggt atatctccta atgctatccc tcccccttcc ccccacccca cagcaggccc |
| 46141 | cggtgtgtga tgttcccctt cctatgtcca tgtgttcgca ttgttcaatt cccacctatg |
| 46201 | agtgagaaca tgcggtattt ggttttttgt ccttgtgata gtttgctgag aatgatggtt |
| 46261 | tccaatttca tccatgttcc tacaaaggac atgaactcat cctttttcat ggctgcatag |
| 46321 | tattccatgg tgtatatgtg ccacattttc ttaatccagt ctatcattga tggacatttg |
| 46381 | ggttggttcc aagtctttgc tattgtgaat agtgccacaa taaacatacg tgtgcatgtg |
| 46441 | tctttatagc agcatgattt ataatccttt gggtatatac ccagtaatgg gatggctggg |
| 46501 | tcaaatggta tttctagttc tagacccttg aggaatcgcc acactgtctt ccacaatggt |
| 46561 | tgaactagtt tacagtccca ccaacagtgt aaaagtgttc ctatttcttc acatcctctc |
| 46621 | cagaacctgt tgtttcctga ctttttaatg attgccattc taactggtgt gagatggtat |
| 46681 | ctcattgtgg ttttgatttg catttctctg atggccagtc atgatgagca ctgatccaga |
| 46741 | ttttttaaaa ataaaagaac tacaacaaaa agctcctaag agcaaatact taaatctccc |
| 46801 | taaccagttc cagcttctct tctcttaatt cttacaaaat ttcccctttg ttctaMggaa |
| 46861 | ggaattgata ctgtctacag tagatagaac tggaaaaaat gatttctgtt tcaccgtgta |
| 46921 | ttgctttgag ctagtcattc ctttagtttg ctacagtaaa agatttgtgt aggttaggtc |
| 46981 | taacttttgc tgacttaatt ttttttcctc tatacatttt atctgatggg aaatacatga |
| 47041 | aggctttgga ttctctttca atgtgtacat gtaataggtt taagcagagt ttgctagtgg |
| 47101 | caagctgctc tcatctccaa gtgtatttct ggcatcaaat tattgttttg aagtatttta |
| 47161 | aaattgtata aaatatataa aactttattt agtacttcat aaagcttcca aaggaaagat |
| 47221 | gtgtgcaatt ttgtgacggt tttctttttc ttttatcttc tcactaacta caattgtttt |
| 47281 | tccgaatgtt gcctatgcct ctagtagaat ttttatatga aataaacatg aggttggctt |
| 47341 | tcattgactt ttagtcccac cagtaactca acatttattt agcactgact atgtgccatg |
| 47401 | cactttatta gaggctgcag aaacaagatg atgaaaagag tgtgtccctt acccagagtc |
| 47461 | cagcagagga ggtaatttca gcaaacaact gtagagtgca ctctcacaga aggaagcatg |
| 47521 | tgggctatgg gacagtaaaa gaggactatt taaatcagac agggacagag gtggagtggg |
| 47581 | aaaaggctga gtcctcaaga atgaaataaa agagagtggg aaggattttt aagagaaaag |
| 47641 | atgagcaagc acacagacct atgatgaaca agatgtctgt gtcggccagg cgtggtggct |
| 47701 | cacgcctgta atcccagcac tttgggaggc cgaggtgggt ggatcacctg aggtcgggag |
| 47761 | ttcaagacca gcctgatcca catggagaaa ccctgtctct actaaaaata caaaattagt |
| 47821 | cgggcttggt ggcacatgcc tatattccca gctacttggg aggctgaggc aggagaatcg |
| 47881 | cttgaacctg ggagatagag gttgcagtga gcagaggttg cgccattgca ctccagcctg |
| 47941 | ggcaacaaga gcataaaaac tctgtctcaa aaaaaaaaaa aaaaaaaaaa aagatgtgtg |
| 48001 | tgtcaaaaaa gaaataacca tgagtagggc cttgcttagg ggaacagatt ctggagaaat |
| 48061 | ctgagaaatc ctcagccact ggccatctca aagactggcc atgtcaggca tctgcaggta |
| 48121 | ggactatatc ttcaagagta ggagtcacag agtgactcag agtactgtgt gacatgggat |
| 48181 | ctgattttat tttatatgga aaattctagt gctatgcaat taatggaatt Kaagaaagta |
| 48241 | aagttgaagt cagtgcaacc attatctttg accatattaa gaataaaatt aaataactta |
| 48301 | tagaccattt gcttctctga cgattattct tatctaagac aatctctgta ttaaaatcct |
| 48361 | acgcagacat atgttcccac aatatgtcag gtatgaacag aaggactgcc caatgtgact |
| 48421 | tgaaagggag tggacttctt gctcttaaaa actacaacct tgtagtcact aacttattaa |
| 48481 | tcatactgta ataagatgga gaaaaaaaca atggaattca ccagaatttc tttcacgaga |
| 48541 | gtctgcctgc attaaaatgt tcgataaagc tatttatgac agaaggtgag actttgaaga |
| 48601 | gctttggttt gggtggaact aatctgtgcc tcatctacac aggaaagggg aggaatatgc |
| 48661 | cagttgctag agagggaata tgtatgtgtg tgcatgtgtg taagcgcatg agagagcgag |
| 48721 | agaatgtgtg tttgtgcaca tgcatgtgtg tgtgtgtaag agaaaggagt cagcttggtc |
| 48781 | tctgtgtgtg catgtatgta agggcatgaa agagtgagag agagagagag aatgtgtgtg |
| 48841 | tgtgtgtgtg tgtgtatgtg tgtgtaagag aaaggagtca gcttggtcta aagggtaact |
| 48901 | ccaatttgta catttttcct ttctcccaat catcaataag gttattgaag atgtgtgtgt |
| 48961 | gtgtgtgtgt gtgtgtgcat ataagagaaa ggagtcagct tggtctaaag ggtaactcca |
| 49021 | acccgtgcat tttccctttc tcccaatcgt caataaggtt actgaaggta caaaatcccg |
| 49081 | acttgttttg ttttgtttta ttcattgaag ggactgagct tgaaggccag attggcccaa |
| 49141 | gcagaaatgt ctctctgagc tgacataaga gaagagtcaa agaaagagga gaaagctttt |
| 49201 | ataagaataa ggaggccttt tgtccaaaaa attggagttt gagctaagtt taattaggca |
| 49261 | tctaggttgg gggcttcatg tgacatgtgt gcaactgtga gtgatattat tctttgaaag |
| 49321 | aaactggaag agtggagaaa gattccaatc tctattccac ttcatacaag caattccagg |
| 49381 | caattcagct actaatcttt ctagggcctt atttcaccta tagattggag ataataacaa |
| 49441 | gagccttgta agttatttta gttcaagtga gaggttgtga gttaaataat cttgcattga |
| 49501 | ttgcctaata gattcttttc ccttcctcct ccattgtatc ttcactttct cctggactca |
| 49561 | agtctctaac ttaaatgcaa acattctatt aattttagtg agcctatcaa ctaataccta |
| 49621 | ggtataacct cggggtccag aaacttaata gWtacctgga acagttttta gggtagttag |
| 49681 | aaagaaaaaa gaatttcaag gaatgaacag ggattcattc tgaagaagtt cacttagaga |
| 49741 | acacaggcca ttcaggaagc tacaaacagg tagggatata aagtttagat cagacagtgg |
| 49801 | acaaagataa agatggagaa ctagtcttgg aggacttgta tactattcta agacaatatt |
| 49861 | ttcttctaaa gaggccatta aaaatcttct aagtgaggaa gtcacatggt cagatttgct |
| 49921 | tttcaaaaag attactctgg gaatagtata aaggcagatc agaaaagtaa agaccagtta |
| 49981 | agaggttggt gaccagataa ggagaaaatc ctaagcagtc cctgaagggg aaggagaagc |
| 50041 | tgcagaaagt taggaggaaa aactctcagg agcaaagaaa aaggaaatgt caaaggaaaa |
| 50101 | tattgttatg gactgaatgt ttgtgtctct ccaatattca tatgctgaaa tctaatcccc |
| 50161 | ggtgtcacgg tatttggagg gaaagccctt cggaagtaat taggtcatga gaatggagcc |
| 50221 | ctcatgaatt agattcgtgc cattataaga agaggccaga ggttgctctc tttctaccat |
| 50281 | gtggatacat gctatgtggg cagtctgcaa ccctgaagat gccctcacca gaacctgact |
| 50341 | atgctgacac cctgatctca gacttccagc tcccagaact gtgagaaata aaWgtttgtt |
| 50401 | gtttaagcca tcagtttatg gtattttgtt atagcagctt gagctaagac aaatatcaag |
| 50461 | gctttgccat tgatattcag tacagaccgt atatacccac aggtttgcgc taagataatt |
| 50521 | ttcattccaa acacatattt cagcaacaca agactaaaga gggtgttaaa gaatgctact |
| 50581 | gaggaagctt ttgtctggga agttgtttga acaaagttac aggacaattt ttgcaaacag |
| 50641 | gtttaaaaaa agttacaatt atgtatgcta tttacgtatt cttgttgtaa ttttaggaat |
| 50701 | caattttatt tccctggggg gactgtagga gagcatctgt gtttccatca tatactatca |
| 50761 | atcttaggat ataacagtct tttgttcttc acctttgtca attactgcat acagtattcc |
| 50821 | ttagagaaaa caaggagttt gaacagatta tctttagcac ctacccagct ctaacattca |
| 50881 | tttattatct gatttctgaa attgtactat ctgggttagg tgttggtttt aaggttgttc |
| 50941 | attatagtta gcctggatgg ggtcagctat gtttgtagag ggaattccta aactgaccag |
| 51001 | ttacttgtca aggatcccat ccaataccat gatcctggaa ttctgtgagt ttagctcaac |
| 51061 | tgttcttcag gggtacatgt tttctatttg aaattgaggt atYctcagaa ataaagctat |
| 51121 | taataaatag aaagttctgg agtatattta cactcactct gcttatctcc actcctaccc |
| 51181 | ctaccatatt cccatccaat actttgccag ttgacttacc aatttcttct taatttctgt |
| 51241 | aactgtcacc ttcagtcaaa ttctcatctg tgtatttcta gattcatata atggtctact |
| 51301 | actggatctc cttggattca ctttttctca acacagtcct atttataaag tcagaataat |
| 51361 | cttccttaaa ccctggtttt attgtttcat tcttttaaga acctgctgca caactctctc |
| 51421 | ctacttattg tattaatgtc acacttctgt tcacataggc ctttttcggc tgcttttcaa |
| 51481 | tacctttccc ttttatttac atctaagact atcccatcca agactgccca tcttagccaa |
| 51541 | tctttccacc tggaaataat ttgctggctt ctgcctgtat gacttttcta atgtcatttt |
| 51601 | tatatttgtg tctaggcctt tctataactg tctagaaaat tcctgacatt tacaggcact |
| 51661 | cagcaaatat ttgtgagtga ataatcagta agtatgcttg ttttctatca gataagaata |
| 51721 | tttatttcca aaYgagattc aaacagtaat actggcctgg gtgtggcttc ctacatgtaa |
| 51781 | tcaccctcgt ctatctcttg ttctcagtct tttgctttca aactctttct ctttttttaa |
| 51841 | aagagtatta ggaactaaca ttgccaaaat ttggtaatgg tcaagcagat catggtgtct |
| 51901 | tactgaagtg aaatattaac attaaaataa aaatgacaag tattatggta tatcattcat |
| 51961 | atgtaatgat ccttacaaaa tagagtaaaa ttttaaaaga attcaccaat acaccagtat |
| 52021 | gatgtttggg agaaacagat gaatgcacaa aggtgcatct gatgcaaaca cccccagaaa |
| 52081 | aatgagcata agttcatatt atcaatattt ttcactctaa aagtgttcac tgacttccct |
| 52141 | gaagtcacca aggactccaa gttaagaata ctttcctgag tgaagaaaag aaagcaatta |
| 52201 | ttttaatcaa cactgcccca gaatctttta ttcggaatcg ctatctctgc tttcttcttc |
| 52261 | ttcttttttt taactttctc ataaatctct gtttagcatt tatatctctc tcactatgag |
| 52321 | atacctaagg gttaagaagt aatgccaaag agacatttgt ccagttgaag actgggatta |
| 52381 | agaaaaaaca cacagccggg catggtggct catgtctgta atcccagcct tttgggaacc |
| 52441 | caaggcaggt ggatcacctg aggtcaagag tttgagacca gcctggccaa catgatgaac |
| 52501 | cccatctcta ctaaagaaaa tacaaaacat tagccacgca tggtggcggg tgcctgtaat |
| 52561 | cccagctact tgggaggctg aggcaggaga atcacttgaa cccgggaggc ggaggttaca |
| 52621 | gtgagccgag attgtgccac tgcactccag cctgggcaat aagagcgaaa ctctgtccca |
| 52681 | aaaaaagaga aaaagaaaag aaaaaacaca caaaagattt cccgaaaaga ctaggccctt |
| 52741 | ttaaacaggc tatgaacaga gtctcagaaa ggtaatttct tatgtacaat ttttaatctc |
| 52801 | attacttgca ttacaagcaa cacatatgag tgataaacta ttttggccta ctggtaaacc |
| 52861 | tacatttgtt aactgtgtgt gcattataga gaacaaattt cagaactcaa gagtatatcg |
| 52921 | gttatatttg gcttatccag ttgtatatga actggctcca tacacgaata agataaatta |
| 52981 | gttttataat tttacaagaa tatctatgga gatttagatt tggctaagaa agttattata |
| 53041 | cacacagaag aatccacaac ctataagagc tcttcatggg aaatagtgtg atagatcaga |
| 53101 | aagagcatgg acttttgagt cactcagaac ttgaattcca gccttgccat tgttctagtt |
| 53161 | gtattatctg aaataagcca tttaaaagac ctgagcacat tgtatacatt gagaattaca |
| 53221 | gggttattat gagaaatgca taagaaatgt aaagtaccaa gggctgtatc tgacatatag |
| 53281 | aaggtattca atcaatagta ggtatactga accactttgc agagttgttt aaataagtta |
| 53341 | attttaaata aggtagttaa tatttgagag tttccttcct tttccacaga ttctcaatcc |
| 53401 | taaaacagtt actatttttc catcatcacc atcaaccctc aaatattaac cagttctgag |
| 53461 | ccaaatgtga gtgaacaacc tatgatttag aatagctttt agaccaggca cagtggctta |
| 53521 | cgcctgtaat cccagcactc tgggaggctg atgcgagcag atcacttgag gccaggagtt |
| 53581 | caagaccagc ctagacaaca tggcaaaacc gcatctctac taaaaataca aaaagtagcc |
| 53641 | aggtgtgtgt ggcacatgtc tgtagttcca gcttcttggg aggctgaggc aggagaatca |
| 53701 | attgaaccct ggaggtggag gagatggtgc cactgcactc cagcctgggc aacagagtga |
| 53761 | gactctgtct caaaaacaaa caaacaacaa aatagaatag cttttacaag accacaccaa |
| 53821 | atcatgaaaa gtcaactatg taggaagaat atgtatttgt cattggttaa tgacagagca |
| 53881 | tcacttacac tgaggttact gggaagatca tttcaaacat ttcccaaaga atgttccaat |
| 53941 | caatattgtc cttataagat tctccttact aatgacgttt tgtggtcaaa caagcttggg |
| 54001 | aaatattgta tatgtaggct ttttacagtg atttctaatg gacacgaacc taccaaaagc |
| 54061 | tagaaggtcc acagcaaaat gagatattta attttattaa caagcattat ctaaacctgt |
| 54121 | ttgattttag aatgcatttt tcacacaaca actatcacct cttgaagaat acctggaata |
| 54181 | ggttttccta tacctatacc tatatgtcag gtaactccaa aacattaaca aatacatgtg |
| 54241 | tttagtaggt tcccatatgg ttgaaatctc cactaacgac attttatttc tcttcctcct |
| 54301 | gactttgtat gctatcgaga aatggtcaga gagtaatctt cctccctccc tttcttcttt |
| 54361 | tctttctctc tttttccccc tgaaagagaa tagtcaaaaa atccatacat atttattgag |
| 54421 | cctctctgat gtgatagttg ctgtgaaata caagaacatg aaagattcag cagcctgggc |
| 54481 | ccaggaagga accataataa cctgctgaga aaatcagaca catgatcggc tgctgcctag |
| 54541 | agacagtgta aggtagcata taaatcattc agcctgggag tgctactgta gttcgagcag |
| 54601 | ggagagggag gtatggacta tagctcagtg tgctgggttt caggaagaag gtgaacttgg |
| 54661 | atgtaggtct tcaaggaaga ctgtggtttt aatggctgtg ggaggaggga gtccgctggc |
| 54721 | attgttttca ggYgtaggaa atgtctgcag cctgaataaa ggttgtatgt gtggacagta |
| 54781 | aatgggctgg gtggagtaga cacattccag ggaggagaag ggatatagag ttgaacactt |
| 54841 | aaatgtgtgg ccttgagcta gtggatattg tgggaattgg ataagtgcac tggtagccta |
| 54901 | agaggataga atggagaaga gagaaggatg gagactaagg agctattgtg gtagtccaga |
| 54961 | tgcagtggaa agcaaagagt tgtggaggta tccactttag tggtctacga tgacagttac |
| 55021 | aagcaataga aagagtatga cttgggaaca gtggttcaaa tgctggctct gcaacttagc |
| 55081 | aaccatgggg caaatttggg caaattaact tctctgtacc tcagttttct tttttgtaaa |
| 55141 | atagggctaa aaatacattc cctagaaggt ggcctccagg ccattttccc acactttatt |
| 55201 | tgaatgttaa aactaacttt aatctaaaaa tcatatattc atatctctat cttttttggc |
| 55261 | ggttcagttc aacttaaatg tgttatttgt taaaaacttg taattatcat ctattacatg |
| 55321 | taaaatataa gagctgcttt taatagtaat tcatctcctc cctatctttt tttaaaacat |
| 55381 | ggtcaaaatt aacaaaacaa tcttgtattt ttgatactag tagtggtatc actactacta |
| 55441 | gaggtacaag gactcttgta cctctctgaa aagtagcata attagcaaca gtattgatgg |
| 55501 | tatctgctat tttagattat ttaaactgta gtcactaagg taagcaaggg gaagaaggca |
| 55561 | tgtcatttat gtgtttttca tccttaagat tagcgtttgg aagcatatat tattccacag |
| 55621 | caatctggat aggtcttgcc atgccctgat cttgtaagcc caaattttat tttgaatact |
| 55681 | ccagctttgc acttaaatga cagctccttg ataaaagaaa aacaattgcc taacaatttt |
| 55741 | cttccaattg tctgaaaaca taatgggtgt acatacacac acacacacac acacacacac |
| 55801 | acacacacac acacacacaa tctctagggc atatttacta gatagtatta tgtaatgtgt |
| 55861 | agacattttt aattatgata attaagacaa aaatatgtgt agcaagtttt tgatttgaga |
| 55921 | caaatttgag atttactaaa attattatat gtgtgtcctt ctgaagactt catattttca |
| 55981 | ttatatatct tcattcttga agtataactc ttaaattgtt gaattaagtt ttatgaatta |
| 56041 | agttgttttg ttttttgttt ttttttgttg ttgttttttt tttttggcca ggcacggtcg |
| 56101 | ctcatgcctg taatcccagc actttgggaa gtcgaggtgg gcagatgact tgaggccagg |
| 56161 | aatttgagac cagcctggcc atcaaagcaa aaccccatct ctactaaatc taatcttgtg |
| 56221 | cctcaagcga ggcacaagac tcacttgaac ctgggaggca gaggttgcag tgagctcaga |
| 56281 | tcgtgccact gcactccagc ctcagggaca gagtgagatt ctgtctcaaa agaaaaaaat |
| 56341 | ttttttccat ttttaccaat accactattc tcaattcatc cactatttca ctaggaatta |
| 56401 | ctaattcagt ttacataatt tattcaatga ataaattatt caatgaagaa gcttctgggt |
| 56461 | atttaggtgc tacatgctaa tttcaattgg catattttgt ttttcaaatt tgttcttggt |
| 56521 | gacccaataa ttatacctgt ccaccttgaa agtgtctttc ttcatcacct tcaaggccac |
| 56581 | cgctaacaag acctttgaaa agaagtaaac agtagagaat ttcaacttct gtgatgacca |
| 56641 | ccgtcttctt ctgaatcccc agactccact catacaaggt tttggggaag tttaaatgaa |
| 56701 | atgaagcagt ggcttacaaa gtttattgac agtaaactac agtaaaattt atattttata |
| 56761 | ctataacctg gtagatttgt ttaaagtaag aggtgctcac ttttgaaggc atgtggatgc |
| 56821 | tggctttcag taatataaaa aaaatgtaca aaaaggtttt atacctatat ttatttttaa |
| 56881 | aaggtagagg agagcagtgg actcctattt aaagaaactc ttgtgtttta taaataatag |
| 56941 | tcatggcaaa atttgtttac agtctttaac aaaccatgca tttcagtata aattaaacca |
| 57001 | ataaaaagaa ttatatatat aaaataaaaa ggaaatgtat atataggaac agtatatacc |
| 57061 | atacacataa gagtaaatat atattcgagc caatacagag aattgaaaca taatttaaca |
| 57121 | tgaaataaca tttatcctta ctatgtatga ttcactctga tgttttctat ttWatttaat |
| 57181 | tttaaagtat taattgtgac cccttaaatt gattttgaaa tctaccaatt ggtttgaaaa |
| 57241 | cactgaggta agaaattacc ttgcttaata aatgttagtt ttgtttccct cttccctctt |
| 57301 | cctccctttt tataattaaa aaactctccc tctacttctc tacttcacgt gagagtagaa |
| 57361 | cacataaaaa gatttcagtt aactactgtg catatttttt gaagtaattt ctccataatg |
| 57421 | tgtgagtttt ctcagggtac tacaagttta ccaacagaac acataaagca gcggccactc |
| 57481 | actgaaatgc ctataggaga cagatagacc atatgaatga atgaatgaca tggttgctgg |
| 57541 | gcatcctggt tgcagtggct agaactgtgg agggtaggag cagaccacca tatatcctag |
| 57601 | gcatttcatt ggcaaatgaa caggagaagg acacctttcc gtttggccct cattttccta |
| 57661 | gatctttcct cccttcctct gtcaatccct cctacatagc ctatgttccc aaagcacccc |
| 57721 | ttgtattata ataataatta ttatgatatc tgtccttaat caagaactta tactggattt |
| 57781 | ttaatgcctt taggtcttcc ccaaacttca gttcatctat tcgaagtccc tataaaatct |
| 57841 | acctccttag acttgtctgc ccccattatt cccctgtggt tgacctcacc tccatctcta |
| 57901 | tcttttgtca gcaagtttcc tcagagttcc ctctctgcat acttgttcat gctgggttat |
| 57961 | ttgtttttgc cacttgatca tctagacctt tttccctctt tccctccttc tattcaattt |
| 58021 | ctgcctttca ctgctgtaca aaggaggggc agggaggccc tccagggtgg agggaatcag |
| 58081 | tcttgagata acegagagat tcagggtgat gagtcccaaa gttgaagaga atccacatac |
| 58141 | ttcttctgtt tttgttttac ctagcaagga gccttttcta tagacaaagt tRggaaacca |
| 58201 | gaggttatga cgtgattcat ctttgcctac ttaaacttta gcttgattca tcacttctca |
| 58261 | acaaatactt gttgaacccc accagtaata cgagaagctt ggtattctat gaggtgctca |
| 58321 | acttccaaag cttagttcag aagaattctg gcctcaaggc gtctaccatc tagaagcaaa |
| 58381 | caactaacaa atgaacaaat gcagtgattt caaaagaaat taaggtgtgc tgtggtagag |
| 58441 | gcatgcacag gtcagaaaag ttcagaggtt ccagacaggc ttcctgggga ggatatccat |
| 58501 | gccccScctc cacctggtag ttcatgatca gagtttgcaa gcttggctgg gatagaggga |
| 58561 | atagcgtgtg aaccacagaa ggagtggatc tggtggctca gacacggcaa gaaccagctc |
| 58621 | atggcactag gctgcaggca caccatgcac aaaacagtct tttctttccc cagttctcca |
| 58681 | aattctctaa agtggaagcc taggggtgag ggtaagaagg aggtaggaag ctacaaccac |
| 58741 | tggagcaaag gacgaaagaa ggggcttgag tgtctaaaag tgcagaaact caaccgactg |
| 58801 | gacgctgaga caatgtttaa aaaggagttt ttttgtttgt ttgttttctt gtgttttttt |
| 58861 | ttactttaag ttctgggata catgtgcaga acgtgcaggt ttattacata ggtatacatg |
| 58921 | tgctatggtg gtttactgca cccatcagcc caaactaggt tttaagaccc gcatgcattc |
| 58981 | ggtatttgta ctaatgttct tcctcccctt gctcccccaa cccccaccag gccccagtgt |
| 59041 | gtgatgttcc cctccctgtg tccatgtgtt ctcattgttc aactcccact tatgagtgag |
| 59101 | aacatgcagt gtttcgtttt ctgttcctgt gttagtttgc tgagaatgat ggcttccagc |
| 59161 | ttcattcacg tccctgcaaa ggacataaac tcattctttt ttatggctgc atagtactcc |
| 59221 | atggtgtata tgtgccacat taaaaatgac tttttaaagt ggcaactgtg ggaggcaaag |
| 59281 | gagaaaaaac aggagctgcc agataaggga gtgaagagaa cccagcactt tgagaattcc |
| 59341 | gttacatttt gcagcttgaa ttcttcactt tttgctccca ttatgtgcct ctttctcctc |
| 59401 | tccatgaact gggccctgtg gacccaggat cctgctgtct ttgcagggca aagaatggtt |
| 59461 | agaaatgaat tcattaaggt gagaaaccat tgctggcata attctccttc acggaaacct |
| 59521 | ggcacttaaa tttaacctgt ttggttagat ccagctctgc ctcccccatt tYtttctgca |
| 59581 | gaaacaaggc tggcagatcc ctgttcctct taatccttga atggaccaaa tgctgggtta |
| 59641 | tgctggggca gtgagggacc ttacaaacac tgaaatttaa gagaacagtt tttggagtaa |
| 59701 | ggcagtcctt gtttccaaat ctgagctttg ccactgaYtg actagcttgg caccttataa |
| 59761 | aagtgaatta acctagcttg ttttctaatt tataaaatgg agaaagcagt acctatatca |
| 59821 | cagtatgatt ctgaaaatta tttaaatagg actatgtatg taaagcagtg cctgaaaaat |
| 59881 | agcaagtggt cctaaagtca ctatgatgat gaattttata tgcaggcacc tagagcatgt |
| 59941 | taggattttt gggatctttc ccagctcaca ctgaagcttc actcttctcc aacagtctgt |
| 60001 | tatccaatgc tggataactg agatagtctt cccagcattt atcaatgtgg ttaggaacag |
| 60061 | taatcctgga aagcattctc aaattattta tctaattaaa caagcaaacc tttttagccc |
| 60121 | agacatccta aatctctgta gcttgtcttc gctgatttgg tcagaatagc tcagatggta |
| 60181 | ggaagggctt tctgggtaga aaaaaataaa ttagcagtct ggaaaacaaa agatctctgc |
| 60241 | ttaaaagagt ctctaaaaca gcctgatcag cctgtgtatt ttgccatatt atctagcatt |
| 60301 | agtaggggac tgggaaaaat ccagggctcc ttgtagagat agagactggc aaatattatg |
| 60361 | tttgatgcat gagaaccaaa tcagaagtta actctttaag ttattaaatc actaaacagt |
| 60421 | ctatcacaat tatgtgttta ttactagact gaatttctct ggggctggaa ccataatgaa |
| 60481 | ttcatttttt gatctctggt gctaaacact ggctgtcata tactaggtat ccaataaatg |
| 60541 | tttgttgaat ggaactgaaa aagcatgaaa cacttcccct gttaaggctt cttttctata |
| 60601 | atatttccat agtttctaat gcatctgaga atcattaact ggactgttag aggaatatga |
| 60661 | atatggttga gggagctaca aacttcatgc tctgagatgt cacatgatta gtgtaacttt |
| 60721 | tgttccaggg gagagaaatc cctaagagag tgactgttct ccatgcccac ccacccacag |
| 60781 | tgtcctatag agcctttcat tctccagatg cctataatga ctatcacatt gatttgttta |
| 60841 | catatctatt gccttgtctt ccttataggt acagagtcca tacatcctaa ttggcctgga |
| 60901 | acttccaagg tctatgcctg ttataccagt gtaattatga atagcattgc ctttcattct |
| 60961 | aaaaagtgtt ctggtttgaa tgctaaatca tctagacacc ctacttatga gagggttcac |
| 61021 | tgtacatcgt ttagtccccc aactcccctc cccttggaaa tctgggtact accctccacc |
| 61081 | gggggctttc cactatggag gcagctctct caatcacagc attcaggagg tgtaagtcca |
| 61141 | ctcccaacag aacagacacc tgtctacaaa gagactcttg gtggaagaaa aaaaaaaatc |
| 61201 | acttccgtaa gtttaagtct tccttttaaa cttgggtctc ttttgcacat cagaaacaaa |
| 61261 | gaatctctaa taattacatc cctaaatgta ctgaagtcta gaagacatgc ccatttgaaa |
| 61321 | actctaatct agtaattaaa gcttctcagg ttaaactgca ccttaataat gtagcttatt |
| 61381 | ttgtcaagat cagttaaggc cctgtaatgt gatttggaat aaatggacag acagaaatta |
| 61441 | aaatgtgctg gacaaggtaa tcagaaatct cacttcattt agtcaataac aatggcaatt |
| 61501 | cagcgggttc cttttactac tgggatgtaa ttgtgcttgg ctttaatttc ttgtaatgat |
| 61561 | ggaacaaatt aaattacttc atacttttag gaacatttgg ctacatcatg ttttggYgct |
| 61621 | tccataaacc ccactggaaa ttaaatcagc tctgtggttg ctcattctcc ctctttagtg |
| 61681 | ccatgtctgc cttctgtcag caaaatggta atattgtcta ccttaatcca ccagatgcag |
| 61741 | ttgagttaaa agaaattacc tctcccacct ctttcctttc aaatctccct atttgtagct |
| 61801 | atcaaatttt ggcatgcctg ctggaacaca gtcttgttag aacaagcacg gtaattctct |
| 61861 | cgtgagactt taggactctc tctacgacaa ggtcagaatg tacctgtgat tcaaatttag |
| 61921 | atgaggatat gagttggtaa gaacatgaag agcatcagac agttttcagg acacccacta |
| 61981 | cttttatttt gtgctatcag tttttccttt cccaaattgc aggtggagat gcaatcttta |
| 62041 | acgctggaaa tctcttgcta tatgccatta aaattaatta gtctagcaca ttttatcttt |
| 62101 | aggcccttac ctagggcagg taaaatattc tagcacaaaa taacacaact ttcctgaaca |
| 62161 | ccatggctac taagttcata tggtaaagat tatactatac attaccttgc aaatagagtg |
| 62221 | ttgcagactg atattaaata tttaaaatgt atgcaggatt attaataggc aacattgtgg |
| 62281 | cagagactgc taaatgtccc ctaatattga tgcttttctt catcacttgt tttcaaatac |
| 62341 | ctgttttcat gtaagcatgt gactgcccaa aatagagaaa attcacagcc tccttggttg |
| 62401 | ccaggtgttg ccatataact aagttttggt gaatgagttg gtagtagaag cgttatgtag |
| 62461 | atattatatg atgtgctaga aacttccctt aagagaaatt tgtcatctat ctttttatct |
| 62521 | gcctgtattt attgttttct ctttcctact ggctagaatg tgaagttgat ggctggagtc |
| 62581 | ggagcagcca tattggatgg tgagttgaat ttagcaacag aggctacacc tcacagtgca |
| 62641 | ataagatgga aagagcacgt gtccttgaag actgtactgg atagaggtgc catattaacc |
| 62701 | tcggactgcc aactttcaga ttttacatga aggagaaata tctgtcttcc ttaagccact |
| 62761 | tctattttaa atctctctat ttactgctga ataaaatctc aactaacgca aacaccaata |
| 62821 | acaaaaaatt cctattcact catgatatag gattatacct tagtcttttt tgtgtcatat |
| 62881 | atctgttcat tcaccatttt tgctttgatg ttcaataaac atctcaaatt taacatatct |
| 62941 | ataaaaattt tttaaatttt acgttcaggg gtatatgtgc aggttagtca tataggtaaa |
| 63001 | ttgcatgtca tggggtgctg gtgtacagat tatttcacac cgaggtaata agcatagtac |
| 63061 | ccctacagct tagtcttaag aagaagtatg ttcacatagg ccaggctgag acttggatgt |
| 63121 | tggatgactt tcttccagct tactctgatt tgaatatatt gtgtggtagt agatggctaa |
| 63181 | actgcttgct ccaaaactat ctgacaatgc tttttagaaa gtctgccaaa caaaactaca |
| 63241 | agaatcaccc tggagcttcc cttaggcttc agatatttgt cttccctgcc ctacttggaa |
| 63301 | atcattccag cctggaagtc attgtgagga accaaaaaat ggtctcccta ccatgaagaa |
| 63361 | taacactgct tccattgttg ggaggctctc cttcctacag gcactgtccc tcactcatta |
| 63421 | gacacttgaa taataaggat gttcatatat ttattggtgt tggtatcagt tagacagttg |
| 63481 | aatgatacaa atgttcatat atttcttctt attcaatagt ctcacaagaa cactattctt |
| 63541 | gtaaagtcat taaaaactgg atggtctttt cataattatt tccatgattt gtcatctaaa |
| 63601 | gccagtgttc tctcctcctg tcaatctgat agctttaaag ctaagttctg ggtgggtcca |
| 63661 | agtcatgcct gaaaggttta tcaaatgaca tattgcagtc atatggtcgg agcacaaaca |
| 63721 | cctctgaatg tacaatattt taaagcaaaa cagtttatgt gtaagctcta tgaggttacg |
| 63781 | gaccatgact atcttattta ttaccaaatc cccagctcct agaacagtgc ccctcaatat |
| 63841 | aaatctgtca aatgaataaa cgaagagttt gcctgcagta gtaaacttgt tatttgcaca |
| 63901 | cactcgaggc ccacctctat gtgtacattg tcagtgagtc agcctcgtgg atgactctgc |
| 63961 | aggactgtct gtataacatS cactacagtt accaggggac ccaattttca taaattgctc |
| 64021 | cagcatcaca ccctcctctt acagagactc ttcctgtcca ttctaatccc tgacacgttg |
| 64081 | tcatcctcac tcagattccc caatagatag aaatgctgtt aaatatactt gggtagagag |
| 64141 | ggataggcat gctcaaactc Sttttgggaa aaaaaattgc aactgtcaga aatgtgttag |
| 64201 | ctatcttcac agattatgaa acataaatat caattatctg ttcacagcag tgaaagcctg |
| 64261 | catatttttt taagatagca agtataaaac ggctataagt accatgttga gtagagacct |
| 64321 | accaccgaag tagagacctt cactgaaata gtgaagggat ggttgtgttg cagggtcaga |
| 64381 | atgattaccc actggttgac actccctcca ggactaaagg cagcatcacc agcgtccact |
| 64441 | ctgcttctcc actgcttact gttaaggagc aaggcaatag cattatctaa gtaggaacta |
| 64501 | cttcattctt tcaaaacctg gaatcggctg atcagaagaa gaaaaacagt ataaaaatac |
| 64561 | agaaagacaa gattctctgg ctgtcctaat gaatgctagc tagctataat agcatggata |
| 64621 | agacatataa ccaaacatat aagatctatt aattaagggg aatctctatt tgtattaact |
| 64681 | catctatttt ctctaaaacc agtatttagt tatctcccat acattggcat attgtgtata |
| 64741 | tttgcagaat tcaaaatgtt actgatgtga cttttttcca tcagacatct gagctatccc |
| 64801 | tcaactaata gttgagctgt tcctctatag ctcagtatct gagttagaac tcgaagtaaa |
| 64861 | aaggtataaa taagtcatgc tataaaattc aaaggcaatc agatgtttga gactatagtt |
| 64921 | atacagaaaa gtgtccttgt tcttgggagg aatacatcga ggagtttagg gatagagggc |
| 64981 | tatgatgtgt gcagttttct ctcaggtggt tcagagaaaa aaagacaatg tgtgtgtatg |
| 65041 | tatatttgtg tgtatgtgca catagagtga tactgcaaat gaggtggaat gtttacaatg |
| 65101 | agtgaatgca tgtggttttt tttttttttt tgcactaccc atgaagcttt ccagtgtgtc |
| 65161 | tgaaataact tccagataaa acttttttta aaggcaatca gaacagtggc aatgaataat |
| 65221 | tcaattattt catatttgag ctgtctttcc tgccaccccc accccctata acactacata |
| 65281 | catacatagg ctcacataag tgacacttac tatacttttt tgcctatgta atgagtgttg |
| 65341 | gcgaagtacg tgagtgggaa attcagtctt ttgcattcaa gctctaagta attctaagag |
| 65401 | accttttaga taatgatttg acttttaaga caacaatttt gaggttataa tatgatgtca |
| 65461 | tttcatataa acagaactgc ccttttgtcc tttcagattt gattgaaaat ggcccatgga |
| 65S21 | gtacaaccac ctgggaacat atcctcgaga aagacagttg aggcttattg cctaaaccac |
| 65581 | aggctactga aaacttggcc aaaggcgact actctagact ggtgacttca aaagtgctga |
| 65641 | tgaatacagt gaaccatgaa agatgcatta tttgttttga acattttact atgattgatg |
| 65701 | acccagattt ggcaagttag ttcactccca gtggagatga aagtttcact gccttctttc |
| 65761 | tttcaacatt cttgttgaga cagatttcac ttttattggc caatgtacta acaaatcact |
| 65821 | tgcatttgca gcataatgaa ttcattagca acactgtgga tcaatgctat acataatatt |
| 65881 | cctgagtcaa cattaactct taattaaact tccttattat aatgcctctg gaaattttcc |
| 65941 | ttcaggctac taaacttcaa gccaacagtc taagtgttaa tcagtaatca tgctagtaac |
| 66001 | tttttgagat gggtcagggc cagggccagg gtcagtgatc catcatgaat ggcaggttta |
| 66061 | aaaatggata tacgtgatca aaaataccca taagttgacc aaagcattct aacctttggg |
| 66121 | ttattctaac actcagtgta tcagccttct gagcaagcca attttttatt gccttaaaaa |
| 66181 | gtctaaaaga aagataaaaa cagagataat cagttttgtt tggcaatggc aggggtgtgg |
| 66241 | gaaatgaaaa agaagaaagt taaagatgag tgaaaatagg atagtcttgg cactttggta |
| 66301 | tgaaattgaa gtacttattt aaactgatga atattgtaca gaaatataca gagagcagtg |
| 66361 | aggggctaag aacctaattc caaggtaact acaaggaaaa aattattgat ctggattgtg |
| 66421 | accagaattc aagagtttga ctgttgtcat tgttgctgtt gttattaagt taaaaaaaat |
| 66481 | gagaaaaaaa tatacttttt tctagtatac ttaccaggaa aggaaagaga gaaggaggga |
| 66541 | gggaaggagg gagacatgga gggggcagag ggagagagag acaaagacac tgacaaagtc |
| 66601 | tggaaaaaga cacaaattca gatttaagat cccaaaatat gctacatttc tgcccccttc |
| 66661 | aaaatattaa actttgctaa aatacactgg aaattttttt tattgtttat tttttaaatc |
| 66721 | aactagcaga ccaattagcc aagatgatat tttcatcctt ggtactcttt caggtgagct |
| 66781 | ctgtgggcta ccaccagaaa gtcctagcca accaagctct cactgggtca ctctgtgcta |
| 66841 | gctagactac atagcctcct aaaaaagcac Rcagccctga tgctggtcct gccaaagtgt |
| 66901 | ggtttgctgt catgtcctac aggctacccg tttcccagtg atttatcata ataaaccaaa |
| 66961 | tgggaatgaa atacccagaa atatgccata aatctactag tggtgaattt tcaatattct |
| 67021 | gcacaccatg gtgatttgtt aattcagttg gatctctatt aaWcctctct aaaatgtcat |
| 67081 | taaRccatct gttttgactt gttaatcaaa caacttttaa aaatgtattt agagtatcag |
| 67141 | taacccttga attaatgcat ccatcagtaa taatcccctc tccaacttta gatttatttt |
| 67201 | taagctctag cttttttccc caccattcca acaaatagcc tgacttccaa aagtaagaat |
| 67261 | caatcacttc agttgtagaa atgtccagag ggtgccctac tttcgaaaca ggaagtaact |
| 67321 | tgatccagca gtcccacttc ttggtatata tccaaaagaa ctgaaatctg gatcttaaag |
| 67381 | agatattttc actgcagcat atttgtaata gctaagatac agaggcaacc taaatgtcca |
| 67441 | tcaacagatg aatggacaaa ggaaatgtga tatataYata cacacacaca cacacacaca |
| 67501 | cacacacaca cacacacaca cacacacaca cacacatata caatgaaata ttattcagcc |
| 67561 | ctaaaaaagg aaggaaatcc tgtcatttac aacaagttgg atggaactgg aggacatcat |
| 67621 | gctaagtgga ataaaccaga cacagaagga caaatactgc atgatctcac ttacatgtat |
| 67681 | aatccaaaat agtcaaactg atggaagcag aaagtagaat ggtagttgcc agaggctggg |
| 67741 | ggaagatggg aattggtaga tgtggtcaag ggttacaaag ttttagtctt gcaaaataag |
| 67801 | ttctggaaag ctgctgtata acataagtat acaatcaaca atactatatt gtatacttag |
| 67861 | aaatttggta aaagggtagc tgttatatta agtgtcctta ccatgaaagg aaaacaaaac |
| 67921 | aaaaaaaccc aaaaagatgg gaggaaactt ttggaggcaa tgaataagtt tatggcattg |
| 67981 | attgtaatgg tggttttagg gtgtatacct gtctccaaac atcttgcaga ataaacatat |
| 68041 | taaatctaaa gtttccttgg gaaagaagat gagaaaataa ttgtcaagag actgtacacc |
| 68101 | aataaaatag tcaaggagta caatgaaaac ttaggaatcc catttcttcc tttgactcac |
| 68161 | actgtttgat gatatcattc acatcggcat ttggaagtta ttgagacatt tcaacataag |
| 68221 | attgtcctta tgatctatga tttgggactc tcttataaga aagtccattc tataccaatt |
| 68281 | tgttttgttc cttggtaact agaccttctt taattggatc taagaattaa tattcctatc |
| 68341 | tcataaagaa gactaaaagg atccaagtag atggagtttc aaaggtggtc cccataaaag |
| 68401 | catttttacc ttaagcaaag atgtcccaat ttttcctgct tgcttttcgg atgctgttct |
| 68461 | aaaaaaaatg taccttattc cttctactaa aagaaaacct atcaattcat tgattcattg |
| 68521 | aacaaatatt tattgaacat gtagtatgta ctaaacactg ggtaagattc cagatatgca |
| 68581 | aagaggaata agtccctgcc cttaagaaaa ctcacagtgt ggtcaagcta acaattctag |
| 68641 | agcaactgtg tgataagggc tccaaaagca catgcaggaa cacagagaga ggcactctta |
| 68701 | gtcttggagg ggcttcctac agtgggcaat ttttgatgtg tcacaaaagg aggagctatt |
| 68761 | agggcacaag aagagcaagg gtgaagtgca gaaaggagtg aatagatggg gaggggaccc |
| 68821 | aggcaaagag aataacatca gcaaaggtgc aacttcatgg gaacacagta catttggaag |
| 68881 | cctgcccacc atttgttaca gcagaatgca tgtgtgggtg gagatgaggc tgcagagatg |
| 68941 | ggctggagag gattatgaga gatggatgac tagcaaagga agttggtcat gtccttatgt |
| 69001 | ggtgggggac catggaaaga tttttattta taagacgtgg tttattcttc attctgtggc |
| 69061 | aaaaagcaga tactatagtc tgaatgtttg tgtccctccc cacattcata tgcgatgaaa |
| 69121 | cctcatcacc aatgtgatgg tattaggagg tggggccttt gggagataat taggtcatga |
| 69181 | gagcacagcc cttataaggg gattagtggc ttataaagga ggcccaagag agctgccttg |
| 69241 | ccccttccac catgtgagga caaagccaga ggcactatct aYgacccagg aaatgagccc |
| 69301 | tcacaaaata ccaagtctac cgtgccttga ccttggacat tctagtctcc agaactgtga |
| 69361 | gaaataaatt tatgttgttt ataagccacc cagctcgtga tttatttatt tatttattta |
| 69421 | tttatttatt tatttattta tttagagaga gagttttgct ctgtcactcg ggctggattt |
| 69481 | cagtgccatg atctcagatc actgcaccct ctccttccca ggtgcaagtg attctagtgc |
| 69541 | cttagcctcc tgagttgctg ggattacagg tgcttgtgac cacatttggc tgattttttt |
| 69601 | gtatttttag tagagattag gtttcatcat gttgcccagg ctggtctgaa actcctgact |
| 69661 | tcaagtgatc tgcccacctc ggcctcccaa agtgctggga ttacaggcat gagccactgt |
| 69721 | gcctggctat gatattttgt tacagcagct tgaatggact aagacagaag gaaaaatagg |
| 69781 | cctttctgta gcgtgagctg aaagacagaa aatagccata ggtttctaaa gagagaaaaa |
| 69841 | gatatatgtt tgacaatatg tttcaattag tacttttttt gaaatgcagt aagttaccta |
| 69901 | taccttattc catttctaat ctatatgatg gcatttaaat attgactagg tttctgatac |
| 69961 | agtttttgga gtctgaatgt cactgcatgg atgaataaac caaacagatc ggattcatat |
| 70021 | gggtttgcca aatgacaaat ttttttccat gtaagattag aggaaaaact gatttcaccc |
| 70081 | aatttcctgc cttatttata ttagaactga agtcaatgct gttatccctt tgcatgttct |
| 70141 | tttgtattta aaatctgata tagaattgtg ctgttacaga agaaataatt taatgcattc |
| 70201 | tgccctctta tttctcatga gttttcattt aaaagaaaac aaaaaagaaa aaggacatgg |
| 70261 | acttttcttt atttctagac tttataaact ttttagttat caaataaaca catgtattaa |
| 70321 | ttaagtaggt aaaatattgc atatattaaa aggtacttgg agWctcatat gttgtcagtt |
| 70381 | tttcatgact caaaatttat gaaaaaccat ctaagactat cgtaatgaag ttcaattgta |
| 70441 | gatcttgaag tgacaaaaca tgaaccacat tgacttgagg tccagggctt aaaactgcct |
| 70501 | atttgagctc taggttaaaa gcatgtgtga aatgcaaagt ctgacatctg cacagctgac |
| 70561 | tattgtgaag tctcagtatc attgttcata agtaaagctt gtccctaagc cataccacaa |
| 70621 | gcattcccag aggatataga tttcatYtga tttaacatga ttgttgatat tggtagtgta |
| 70681 | tttcacgtga acttgtgaaa tcattgtcta tacagacaat tgagacacta aaactttttt |
| 70741 | ttaagtattt tttgttaggg gctagatctg aggtttttta ttcatttgtt cttttgttca |
| 70801 | ctcatttgtt agttcagtta tttactcaaa aatgtatatt gagcaattcc tatatggcag |
| 70861 | acactgacag atgctggatt cagtgatgag caaagcattc gtggtttcta tgcccaagga |
| 70921 | tcctatcccg tggagtgtag agtcaagcaa agaatgtcaa caacaaatga aaattttaat |
| 70981 | cttattaatg ttatatgcaa aaatgtaaca cctccaaaaa agacaattta tttcctatta |
| 71041 | aggaatgaag gcagtccact gaggaagatc aacatgtaag cacatgtaaa gcaaaataat |
| 71101 | caataggtaa tgtagttttt gaaaaagaag gggctttaag caggaagtcc tgggtttgga |
| 71161 | cttgggtttc aaatctagct atgtactctt gggccacata cccaagtctt gtaagtctca |
| 71221 | gtttcctcct ttttaaagtt agcctaaaac tacctcgctc atctaatggt gtgagaatta |
| 71281 | ggtaaacagc caggtagctc atcaaattgt aattattata attgttattt tttgagtcat |
| 71341 | gaaagttttc acactgaagg gaacatttca acttgacctg gaagagtaag tagtttatca |
| 71401 | ggcagaaaga atttgttagg gtattccaga gagaaggaac aaaatgtgca aattcaagta |
| 71461 | gtcagaatca aaatggtttc ttaaaggaat gacaaacaga tcagtgcagt tggagcctaa |
| 71521 | agttatctaa ataatccgtt agaccttttc tttaactgat aaaataaagc aagcattcca |
| 71581 | aaaatcaatt taaatccatc ttcctcctta tacctctcca ttccccatac catggaaaca |
| 71641 | cagttttacc tcttttacaa tgagttgtca gcatgaagag acttggttca ttaagattag |
| 71701 | caaacttcac agcattgaac aaaagataaa gaaaagttta tagcaaatac gttccatgtg |
| 71761 | aaagcatctc cagcaggttc agaagatgca atgaaaagac taaaacttga tatagggata |
| 71821 | tttcagtggt gctYgtacca gcgtcctaac attttgttct accttagtaa aatctatccc |
| 71881 | ttattactca tcctatctgt agactctctt atggaacaag aagctttttt ttttttttcc |
| 71941 | ctaatcccgt ggggaagccc tctccttccc tgggtgattc ctgagcaacc aggaaaacag |
| 72001 | cagtcacagt caacacagct agtacttgca gaaaatctct cttctgtgat gctctgaatg |
| 72061 | actcacagtt ccagatggcc ttgtcagcct ttatccgcat tccactcttg gcaccattaa |
| 72121 | cctggtctaS tgtggttgca acaaataact tttcttgtta tgaggaccag tgttttgaaa |
| 72181 | aatttaaaat gttataaaat taaaatgttt atatttggaa attatttcca aatataaaag |
| 72241 | gagcctgtct tcattataga ttatttggaa aaaatgcaga ggggtgcaaa agaaaaatgg |
| 72301 | aaacaagcca tctttttttt acccataatt ctaccactca gagacaacta ctgtgaacat |
| 72361 | tttgatgtat ttatctccag tctttctaga aggtagatca ctgtaagaga tttctgaagc |
| 72421 | agaagtacta agtcagaagg aataaacatt tttatacctc ttaatgtgta ttgccagata |
| 72481 | gtttttgaga aatattacag caatttctac ttttagaagt actgcttgag agtgatgtta |
| 72541 | catggtattc tcactaacac atatacaatg ttataaatat gtccaaaaat aaaacttagc |
| 72601 | aactatgtta tctccttgtt tcaatttgaa cttattacaa gagtgatcaa tttttaaatt |
| 72661 | taaatgttat ttttagcaaa gttatagatg caaatagttt agagaactaa gtagtaccac |
| 72721 | aaggattaaa aaaagagatc tcctgcagtg catcccccac ccacaataca tacatgtatc |
| 72781 | ttccactccc cagagggtaa ccattttcaa atattttagc tgattcattt gctatactcc |
| 72841 | actctatctc taaatgatat aactttacag ttacttctta atagttcatt tttttgggca |
| 72901 | ttgcttattg atacttcata gcggaagata aggatttacc tttgcaacac ttcacacttc |
| 72961 | tcatcaccca tccttctaat atattatagt cttacttaga ttgatagtca ttgtgtttcc |
| 73021 | atgagcagaa ccaaagaaaa actataagca gctaaactat gtaacatacc ctgattacct |
| 73081 | ttttttcttt gttttccttc ttgaaaattc ttgtcttttg ttagtttctt tgttccctta |
| 73141 | gatgtccata tatacttatc actaattcaa tcccaaactt ttcccatatt acaaaaatct |
| 73201 | aagtatggct caaacacatc aagaatttta ttaaattcat cttcttgaag aaatctcatc |
| 73261 | cagaggcctc tttgacctgg attggttatt ctccatgtct cttgctcagc tgtcactttg |
| 73321 | ggatgttctt tccttattat cccaagggta atgtttttag agtttattcc cttgttttgg |
| 73381 | tgagcacgtt ttccagtagc ttcctgagtc agtatgcatc agagatacat tttttaaagg |
| 73441 | ctcgcacctc agaaataatc tttattccat gctcactctt gatcaatagt ttggYtgagt |
| 73501 | atagaattct tggttgagaa tcactttcct tcggaattta aaaggcatca cttcattctt |
| 73561 | ttctaggttt caaaacgaat cttcagaagt ctgatgccct tttgattttt gatccttcta |
| 73621 | tacgatacga taatgatcct tagaacaagt cacaagtctc ttttttaata ctttatattg |
| 73681 | tgctaaatgc tccaattaat gagttctgga aatttttctt caattttgtc ctcctgcagt |
| 73741 | tttctctttt ttctagaatt tctgatttta gatgttagat ttcctgaact ggtcctctga |
| 73801 | tttcccactt tttcttctgt attttctacc tttttgtatt tttgctccat ttccatagag |
| 73861 | atgtcctcaa tttacctttc aacccttcta ttgagttttt aacttattct atcatgtttt |
| 73921 | tactttccaa gagctctttt cctattctct gagttgtttt ttttttttcc atagcatctg |
| 73981 | cttttgtttc gtggaagcaa tgttaatatt tatgaataca atatcaagtg tatttcttct |
| 74041 | cctctctctg atgatacctt cttcctgcaa catctgtact tttttatttc tcttcttttt |
| 74101 | tttttttttt ttttttgaga tggagtctca ctctgtcacc caggctggag tgcagtggga |
| 74161 | ccatgttggc tcactgcaac ctccatctcc tgggttcaag caattctcct gcctcagcct |
| 74221 | cctgagtagc tgggattaca gttgcctact accacgccca gctaattttt ttatattttt |
| 74281 | agtagagacg gggtttcacc atattggcca ggctggtctc gaactcctga cctaaggtaa |
| 74341 | tccccccgcc ttggcctccc gaagtgttgg gattacaggc gtgagccacc gcgcccggcc |
| 74401 | aacatctgta ctttgaagtt ggtctttttc catttgtttt ggtttctttc acttactttt |
| 74461 | tctaagtatt tgataaatct tatctgtcta ctcatattta aggctagagt actaaaaatc |
| 74521 | agattggaag ctctgtttgc aYaggtaaga tttgtcaact acatccactt tttgatgatc |
| 74581 | caactgaaca gtttcattca gaaatacctt gcaccattat ctttgggttt tttctcttgg |
| 74641 | gttggtgaat tctccaaagg ttatatcaat ctcctgtcca gaaggcttaa gcatagttgg |
| 74701 | aagctgacta ggggaagaag gttgggactt tcaaccttcg gaattcattc aacaaatatt |
| 74761 | tgagcatcta tatttggcag cctctattct agccaccgga gacacagtgg taaacagaat |
| 74821 | ttaaaaagcc ttgtgttatc atgaacacaa atatataagt gtttatttaa tccctctgtt |
| 74881 | ttcagaatgg cactcagtct tcaacctgcc taggcccccc ttgtctaggg acggttttac |
| 74941 | attcatcagg aagtataccc cttgtatact tgtttttcag cttccaaaat tttgttgctg |
| 75001 | ttatctccct tcccactttc tttgtccttg tcatttatgc ctataaacat ccattgatgg |
| 75061 | ttttctgaag gcagaggagt taaatggata tgttaattac tatagatgta atcagaggtc |
| 75121 | ttcatgttgt ttttttgttt tctgttttac tattctaact tggcatttat agatcttctt |
| 75181 | tgtgagtagt ctgaatttgt ctttaatgat ttaacattga aacagtattt tccttactta |
| 75241 | tttgcataag ctctttcttt gttagtgtat tagccattgR cctgcaatat cttttaggat |
| 75301 | gaccgattct gaagcctgct gactgagttg cttgtggttc ctgtcattta gaatgtatgc |
| 75361 | aggtcatgaa tcgcttagat ggaacagatg gaatgaaact tgctctaaat attttaccaa |
| 75421 | aataaataca tttaaataat gtaaagaaaa atcttcaatc actaggcttt gaacttataa |
| 75481 | cagaaaggta tctgctttta actatattaa ttcaacaaac tttattgaac agttggtaag |
| 75541 | tatgaagcat catctctctg agaacaaaat accaaggaac tgagtcccat cattacagga |
| 75601 | ttctcaggag taaatgggtc aatacatagt tataaaatga tgagggctga tctatagcag |
| 75661 | aagtacaaag ctgagaacaa ctcacttgac ctgctaagct ggggaattca ggaagggttc |
| 75721 | agatctaaag agcagacatt tgaggtggtt cttgaaatat gagcacaatg atggttttac |
| 75781 | caggctgcaa aggtgacaaa gtgcattcca ggctgataaa agagggcatg caaaatatgg |
| 75841 | caggtacaaa aatgtgtatt taaggaagaa tgagaagttt ctggaagttg ctgaagatac |
| 75901 | agaaaataaa gtggggggcg gggggggcgg gtggttggag atgaggagga gatggtaggc |
| 75961 | ttgattcaaa ttatggaaat gtatttataa tgcaccaact tgtaaagaca ctgttgttcc |
| 76021 | ctacccagca gccactagaa tttgttcagg tgtcaggcgg ttggtgcttc aagggagatc |
| 76081 | aggcccctcc caggaccagg atgaaccatg attacttccc agccaatttc atagcatttc |
| 76141 | tcttgccaat gaatggctta gatataagca tatgatgaat ttgtttctaa tacagatctg |
| 76201 | agaaagaaat ctgttaagga acttctggta aagtttttat ctttcttaaa aagtgacaga |
| 76261 | agaaaaggaa gttgtataaa tatacttaga gctgctgtag tcatcttgag accataagag |
| 76321 | gataaaactg agatcaaaaa ctactgtgct gaggatgggt gactagaaag aaggaaagaa |
| 76381 | tctggattct tgatgcatgt ttgtactact agaatcattc tatcactacc ttcttattat |
| 76441 | ataattcaat aaatctctta ttatttaagc tattttaaat gaagccttct gttatatgCa |
| 76501 | gcctaaacaa atatactgat tcaagctccc agcaaattct gtcacacata attcaaggaa |
| 76561 | cgtttgttaa taacttcata ctattatatg gggaataaat gattagtcaa gaaagacttt |
| 76621 | ctgttttgaa aaattctgga aagatgataa tacagtatgt agatttattg tcatggctaa |
| 76681 | tatacatcta catataacat gaattacctt ggagtagtaa taaaagggca gagtaataac |
| 76741 | ttgtgcagag ccctagacta gaaaagttga aaatataaaa tggaggaaaa agtgagttat |
| 76801 | gagattcagt aatatgaaag tataagaaat aaaagaatcc aaaagccata gaaggttgaa |
| 76861 | actgaaaaga attttagaaa gcgtctaggc caggtgtggt ggctcacacc tgtaatccta |
| 76921 | gcactttggg aggccgaggc aggcagattg cttgaggcca ggagttccag accagcctgg |
| 76981 | ccaacatggt gaaacctcat ctctactaaa atacgaaaac ataactaggc gtggtggtgc |
| 77041 | atgcctgtaa tcccagctac ttaggtggct gaggtggaag gattgcttca acctagggag |
| 77101 | gcagaggttg tagtgagcca agatcgtacc acttcattcc agcctgggtg acagagtgag |
| 77161 | acactgtttc aaaaaataaa aagagagtct agcctaaacc ccttaattat acagattgaa |
| 77221 | aaccagtcct ggagaaattg gaagtcctca aagagtttac cattaatggt ggaaccagga |
| 77281 | cttccacaca atgttctgac ttcctttaga gcacttttta ttatatcata tagttcctta |
| 77341 | cttctcacta ttaatagaga ttattttact aagagtaagt ataataagag ctgatcagaa |
| 77401 | gacctgagag acataatgga gtttcaattc taatttgctg ttggctcctt gaaatgcttt |
| 77461 | gttgagaagg agtaaaaagc ttacaaaaca cacacacaca cacacacaca cacacacaca |
| 77521 | cacacacaca cacacaattt cttaattatg tctaccatgg gcatgggatg gtaggaatgc |
| 77581 | catgtaacta gtttccatgg atggaaacca cctaatggga aatagagaaa aagaaaaaga |
| 77641 | aaagaaattg tgtgtaaatt ttcagctcat tttggcttag attacatgat gaaacttatt |
| 77701 | tctttgaaaa actcatttga ttttgaatta gattatatgg aacttctcct ttgtcaattt |
| 77761 | taatttcttg tcttgtttta gtttgctttt ctgagcagta gatatcctcc caattggaga |
| 77821 | ttccgcaaaa ttagtactta gtcatcttgg ttcctttcaa gtagaaaagt ttcttttaaa |
| 77881 | tacttcaaat cattggtatg cacatttgtt gcaaaaaaaa acctcattct ggaaaatgtt |
| 77941 | gcttatttta ttatccaaaa aataggtatt tattaatata ctgcatttct tttaaataaa |
| 78001 | ataaattaca gattttcttc cagcatccac ttatttggaa ttgggtacat atgaagaaaa |
| 78061 | gacttcttat aatatggaat tatttcaaaa gctattatta cttcttataa atataaagca |
| 78121 | tacaagaaat tctcaccatt ttctaagatt tacattagaa agatataagt attgtctttt |
| 78181 | agaatactgt ttttattttt ctaaatattc cttataactt acttattaat tttatccttt |
| 78241 | ctttgttata aatatccatt ttttttaaag acccatacta tcttttccta tgcaatttaa |
| 78301 | cctaacatat tttctgtaaa tgaggttatt tagttatcca tttttctacc tcctgttgct |
| 78351 | tggcagtcct caaaaccatt gcagatcttt ctagagagca gtttttaaga acagtgcttt |
| 78421 | acttttcaac tcttgatcaa cctgatgaga attctttgaa taaaccagaa ggaaggctaa |
| 78481 | agagacaaaa gaatactata gtttccttaa agttaatgag ccagaatcct ttggcccact |
| 78541 | ttggcattga acaatgtgaa taaaatggcc actctcacat cagtaattta cattttatac |
| 78601 | agtgtgtact ttacactgat atttacaaag aggaaaaaca acagtttttt acatgtaaga |
| 78661 | ggagctcctt ggcagataaa agaaaaactt actcccatta gtacaacact ggagtttaaa |
| 78721 | tctagagaac aagtacttca gaacctagta gaaaaagtcc ctgatttgta ctttgtatga |
| 78781 | acaattaggt ttgagaatat tgctatataa tcacagaaaa tactggctat tatactacgt |
| 78841 | gaagtcttca gtgacaaaga gagaaacaga aaaaatagtt aatgccataa caatgaaaat |
| 78901 | gtggaatgtg aggaacgccc agtgaccgta aatatctacc ttaataagcc tgacaatttg |
| 78961 | tatacagttc atgcaattaa caagtgtgat aaatatgatt attactctca agttgaaatc |
| 79021 | aattttcttg gctaaaagca aagaattgtt attgagcaga tgggattact tttctttgcc |
| 79081 | aatttatctt cataaaactc aatcaatgcc ttgccttaaa aatgtcaaat aactcagatt |
| 79141 | tcaggataac acatacaaac taatctcttc tgcctgtctc tacctgatca ctccctactt |
| 79201 | caaaagctcc aacaacatag tataactgac acaaatcaaa gcaaaaacta tttttctcac |
| 79261 | tgctacatgg tcttatcaat aatccagtat ttcaatatct aataaaagat accacaattc |
| 79321 | aaagcagtaa tgtgccccaa gctaccgatc cacaacatat atattgatat ctaaaaatat |
| 79381 | atggatataa cttgttatct actaaataag tttctttgca gtgtggtgtt aatagccaga |
| 79441 | attttaaata cataaaaact tgggttcaaa tcctaactct gccacttaaa tgctatatga |
| 79501 | caattggtca agttacttaa cctctctctg gtctcaagtt tcttgtctgt aaagctgtaa |
| 79561 | tagcttttag agtgctcttc tgaatattaa aaaggcatta tactcttagc ataatgtcta |
| 79621 | catagagtaa atatttaaca acaaaataac aaatattagg tgtgttattg gagaattgga |
| 79681 | gttttaaata aaggagttgt ccctaaggta cattcaattt aactatgata tttaaaactt |
| 79741 | caatttttca cattattttt ccaggaaaat atttcactct tatttctcca taatttgttt |
| 79801 | tgaattgtaa aagagatttg caagcggctg aagcagttac actatactgt atatctgcag |
| 79861 | gatgggcaac tgattttttt tttcttcttt tttttttttt tttgagacag agtctcactc |
| 79921 | tgttgcccag actggagtgc agtggtgcga tctcgctgca acctctgcct ctcaggttct |
| 79981 | agggattctc tgcatcagcc ccctgagtag ctgggactgc aggcacacgc caccacgcct |
| 80041 | ggctaatttt tgtattgatt ttcaagattt gtcaagagct cctaatattt tcttttctca |
| 80101 | aacacatctt aggactacca tgcatatcag tcagtcagct actctggagg tctgctgcaa |
| 80161 | ggatacacac cttccattcc cacccatcag atacttgtct cctttctccc ccactccaag |
| 80221 | acagcaacct tccagctcta gataaaaaga gctagtcttt cttgcataag aacaacaaag |
| 80281 | acaaaaacca ttttggtagt gtatactgca gattttaacc aaaacttctc tgaagacctc |
| 80341 | tgatttccta aaaaacctct tcatcccagt gcagttgctc tttcctaaat gagcaaccgc |
| 80401 | gcatctggtc aaatttggtg aatattctgt gctccagaaa caactgattc catccccttt |
| 80461 | aatctcttct tctcttatat ccatctccct ccttgttgtt tctctccatg tttacaacta |
| 80521 | gttcattgat ttaaaaacca atgtaataca caaggaagta tgcacgacaa tgtttagtgt |
| 80581 | agtatggttt gcaatattaa aaaaggccat cagtaagaaa atagttaaag gataaacttg |
| 80641 | atatacatac tatgctgcaa tttaagaaaa ctggtataga tttatacgta ctaaaataaa |
| 80701 | ataatctcca aaacatagta agtgcaaaga tcaatcacaR aataacatct gtagtatatc |
| 80761 | acttttgatt tttaaaaatt acccctaatt ctaaatgttc atatatataa atattcagtt |
| 80821 | aaaaattctg aaaagatact gctatggttt gaatgtttgt tccatccaaa actcaggctg |
| 80881 | aagtttaatt gccattgtaa cagtattaag aggtaggact cttttttttt tttttttggt |
| 80941 | gacagggtct cacttcaaca cccaggttag agtgcagtgg catgatcata gctcactgtg |
| 81001 | gcctcagctt cccaagctca ggtgattctc ccacctcagc ttccagagta gctggaacta |
| 81061 | caggcacatg ccaccatgcc cagctatttt gttgtatttt tttgtattga tagggtttct |
| 81121 | tcatgttgct caggcaggtt ggtctcgaac tccttacctc aagtgatcca cccacctcag |
| 81181 | cctcccaaag tgctgagatt acaggtgtga gccaccacat ccagcaagag ttgggacttc |
| 81241 | taagaggtgt taggtcatgt gagctttgcc ctgatgtaag ggttaatcct gttatcactg |
| 81301 | gagcaggttt gttataaaag agtgagacgt ttggtcccct ttcctctctc tctcccaatc |
| 81361 | tgtctatctc tctccctttt gctttctgcc atgtggtgat gcaacaaaag gacccttaac |
| 81421 | agatgccagc accttgattt tagatttccc agcctccaga actgtgagcc aataaatttc |
| 81481 | agctcatgat aaattaccta gtctcaagta ttctgttaga gcagcacaaa atggattaag |
| 81541 | gcagatatac accatattgt atccatcact aagtggatac tttcaagaaa gacagcaaga |
| 81601 | ctaaggagca tgaaaaagga ctttctcata ttctgaattt taaaaatatt ttatgacatg |
| 81661 | aatatattta tctattacct atgtaataaa actagacatt aagagaaaaa tctcatggta |
| 81721 | gaaatcttag gaaatagaga aaaattagag aaaattaaga aaaagcatgc ataatttcac |
| 81781 | aaaccaatgg tagccactgt aaaaaaatgt tatttcattc taatacattt ctacacacat |
| 81841 | atgcacacag tgcatttttg aaaacataac tgagtctttt ctaattgacc tcttactcta |
| 81901 | caaaatttga aatagccaaa acaaattttt gattcctata aagagatagc actagagctg |
| 81961 | gaagagatgg ctcatgcctg taatccctac actttgcatg actgaggcca gagaattgct |
| 82021 | tgaggccagg agtttgagac cagcctgggc aacatagcag gacccatctc tacaaaatta |
| 82081 | ataataataa taataataat aataagctgg gcataatggt gtgtgcctat tgtccttgct |
| 82141 | acccagaggc tgaggcagga ggactggttg agccctggaa gttcaaggct gcagtaagct |
| 82201 | atgattgcat tacactctac ccagtgtcaa ggaaaggaaa ggaaaggagg ggagaggagg |
| 82261 | ggagaggaga ggagaggaga ggagaggaga ggagaagggg aatgggcagg ggcaggggca |
| 82321 | aggcaaggaa aggggcaggg gcagaggcaa gggaagggga aagggcacta ggacctatga |
| 82381 | gccaacatag gctatggctt ccactagtac aacttaaaac tcagctgaag acatgacaca |
| 82441 | tagaaaaggg ttgctgtgtc tgtacacaca cacgtttccc atgttcccaa tcccagtctg |
| 82501 | tggtcagtga aagtgaagat tgcctcagag cctgcattat ctcaagctac tgacctaatt |
| 82561 | gctaatgctt tactctggYc tatttcctgc Mtgacctcag aatgtgtcag tgtaaattcc |
| 82621 | atagtaagac agtagttgca cattttggag tgtggattct gctttgaaac acaaataagt |
| 82681 | gtgatgaacg tgaccctggc actctgtagc cctcagtttc ctcaacgcta aattgatcac |
| 82741 | tacagttcct tctagtgtaa acagtcccac gaagaatcgt gctgaatgga tgactacata |
| 82801 | atggcctgct cctagagttc ttaaatcaat ccttaaaact ggctgcaaaa tgacttcact |
| 82861 | cctttaacag tgtgggactt gtctctgttc tccagaatgc tcaccagatg gtgaagaagt |
| 82921 | atctctctac ctaccaacat cgtcatattg cttcttgcca ctcgctactc aaaaaYtgtg |
| 82981 | aaaaacctgt gggagcaagt atcagctgaa aagggtggct ttctccttag gcaaaagctR |
| 83041 | cagggcaaaa cgggggcccc aaacttctat cacgtcaaag acatgaaaca gatgatccct |
| 83101 | agttttgatc ttctttgaag tttattaaaa acaagcttga atctgtacca atcctgacag |
| 83161 | gtgtgaatgt aagactcaca aatgagaaat gctaagcttt cctaatgttc aatttaatct |
| 83221 | tatagaccat gaaacatgtt ataattaaag atctgaacta ttaatatgaa ggagatagca |
| 83281 | tatattctta ccccaaatat gactaactag gtaaaatctt caaaatataa tcatggcctg |
| 83341 | attatcagcc attgtggagg agaattttaa aaagttcttc attgacatcc caagtttatg |
| 83401 | ttttagacac ttctaatcaa acatgaatag attaacttca agtaaaaatt aatagtcaca |
| 83461 | ttattgatta tcatgattgg aaatgtattt gaccagaaca atgaggaaag agcatagagt |
| 83521 | cctgctatct tcaagtatga atttacactt ttaactgatg tcaagtcatc catagtatga |
| 83581 | aaactcattt atttttattt gaaaaattta aaaccatcaa aatggatagt gtgggagcca |
| 83641 | aataatatat aagcaatatt ttatgagaac tacaaaacta ttaagagcag taactagaat |
| 83701 | tcggttactg ccgttcctta tttcagaaga gaaagtcaaa tgttttctga tatttaagaa |
| 83761 | gtaataactt cctgttgtto agttatgctt tctataatta tatatgataa gcaacagaaa |
| 83821 | aataggtctg gttttggctg taatgtgtat attcaattca atattaattt ggactttaaa |
| 83881 | tcattttgct atcaaatatt ttgaacctca tgaccaggaa gtaatcaggt aaaaaaaaaa |
| 83941 | aagaaaaaaa gtgggtttgt tacctgacct atctcttaag ttcaaacttt ctataggtat |
| 84001 | ttttctctac ctttgtccat atggttatac aattatcact agatgcttga attactaaat |
| 84061 | ggttttgtat atcttttcct caaatttata tttgtcctat tattggctta gtctctcaaa |
| 84121 | gtattacttt tatgatattg ctataatggt cctctatagt ataaagttga gcccacacca |
| 84181 | tttatcctgc cacttaacaa tgtccttaat gtagattata tggtttggcc atgccctaac |
| 84241 | caaaatctca tcttgaattg taatccccat aatccccatg tgttgcggga gggactgggt |
| 84301 | gaagataatt gaatcatagg gcagtttccc ccatgctgtt ctcatgataa tgaatgagtt |
| 84361 | tcacaagatc tgatggttat ataagcttct ggaattttcc ctgctggtgc ttactctctc |
| 84421 | ctgctgccct gtaaagaggt gcattctgcc atgattataa gtttcctgag gtctccccag |
| 84481 | ccatgcagaa ctgtgagtca attaaacctc ttttctttat aaattaccca gtctagggta |
| 84541 | tttcttcaca gcagcatgag aatggcctaa tacagtagta tatcacactt attaaagagt |
| 84601 | tgatagtaaa atagcactct cagtacaata agaatagaat agttcctttt catggtaatg |
| 84661 | aatagctttt cttcgacatc tataattaac aatgaaatca gaaacaaaaa gaagctgtct |
| 84721 | ccactattac tgaatgttgc tcagaaaatt ctaacgtaag caaccaaaca agaaaaccaa |
| 84781 | atatgctgta caaatatttt taagagagaa ggaaatcatt ctattttaag ataaaaattc |
| 84841 | tgtaactcaa aattcaggag aatcaactga aaggtataaa aaaggtagac cattatgatt |
| 84901 | tataagaaag gtcaaacatt ataaagcatg tatccacaac aggttttttt ctatatacca |
| 84961 | gttagaaaat agataaatga tcctattcat aatagtaata aaacatatca aatatgtata |
| 85021 | aataaacaac gaaaaatgta aaactcttgt ataaatatta ttgcaaaaca tcactgaagg |
| 85081 | acatttttaa aaacttgaag aatatatcta gtttcctaca tgggaagagt caatattata |
| 85141 | aagatatcaa gtcttagatt aatctatgag ttaaatgcag ttacttttgc cctaaaatgt |
| 85201 | taaaaggctc ttaattatgc aattcgaaat gtgatgtcta ctttcttctt gaaagcattt |
| 85261 | ttcctggaac cttctgatga ctctaactta ggctgcctgc tttctaggcc tactactaca |
| 85321 | cagttgtcat actgggattt attttcataa acatctgggt tggttccaat gctctttgta |
| 85381 | tcctaggttt tctgtatagg attcccgttg ctttgttttg cttgaatata tcttcgagta |
| 85441 | atacttcctt ttaattagga agaatctgta ggaggtaaag ttgtaaactt gagtccttcc |
| 85501 | atgtttaaat acatctttag tttgtcttaa cacttgatag tttgactatc aattttgggt |
| 85561 | tctagttctt cttcctgaga actttgaaac cttgcctagt ctgcattcac ttctaatctt |
| 85621 | gctgatgaga agtttgatac ctttgaaaga tccttttttt ttgttctctg gaaggattaa |
| 85681 | tttcttatac ttagaattcc aaaattttca tcagcatgtg tatacacatc tagatatgta |
| 85741 | tccttttttc cttgttcggt gttggatgaa acttttcaat ctgaggactt gaattactct |
| 85801 | tcaggtcaag gatttttttt ctgttatttt cccacatcct ttcccattcc tccacttcta |
| 85861 | ccacattctt catatctttt ttacttttcc atcRtatttt atatccttgg ctttttgctc |
| 85921 | tatattctaa gatatttgct taattcaata ttcaagaatg aatattactt gaattgcatt |
| 85981 | ttatccaatc tttatatata catatatatt cagtattctN ctatttatgg aaatcagatc |
| 86041 | atacttaatg gttatattct ccccctgaat atctctgaaa atttaatatt gacaaatttt |
| 86101 | tcccacactt ttcattgtct ctgtttcttc tggaaagcag aagataaatt gtctcaggaa |
| 86161 | aataaatttg tcctgtttat ttattagttc ctttttgttt aggctactgg tttttttgtt |
| 86221 | tggtttggtt ttttgtcttt tttcaaatgt ctggtgatcc tttcttgact gggaatattt |
| 86281 | gtaatttaag aactaggagt ttcttaagta gttggcaggg atatcataag gagctctgta |
| 86341 | gtacttataa actgcttata agcaacttaa tgcaatttca atcaaaatct taatgggttt |
| 86401 | ttttgggggg gacttgacaa gtagattgtt tgtataattt agcacaacga tgtgagaata |
| 86461 | acccaggaaa ttctaaaaaa taagattaag agggaatatg ttctcccaga tattaaaatg |
| 86521 | tatttcttaa aatccataat aattataaca tggggctttt tgtctagaaa taggatgtaa |
| 86581 | agattaaaaa aggaactaac cataaacagt agaagtggca tttcaagcca ataaggaaat |
| 86641 | aatagattat gtaataccta ggattctgac aatttagaaa atctaggaaa agaacatcag |
| 86701 | agccctgaaa taaagtaaaa taaattccat aattattaga gatataaata tatgatgtaa |
| 86761 | aatgattaaa tactagaaga aaatattggt gttggaaaag aattgctaag gatttataaa |
| 86821 | atatatttat atagagacta tataaacaat ataaacatac aggctacata gggactattt |
| 86881 | aaacttctat ttattaaaat agagtatctg taaaagtaaa aatagaaatg aataaatggc |
| 86941 | aaaaaaNtgt aaaaaacaaa cataaatgaa aagttaatat tcttaatctc taaagaacac |
| 87001 | tctaaaatca ataagaggcc aggggtggtg gctcacacct gtaatcccag cacttcgaga |
| 87061 | ggcagaggca gtcagatcac ttgagtccag gagtttgaga ccagcctggg caacaaagtg |
| 87121 | agacacctgt ctcctaaaaa ataaataaaa ataaaatcaa caagaaaaaa caaatcagcc |
| 87181 | cacgaataaa taataaaata ataaaaagca aatatgtata attgccatta gacacacaaa |
| 87241 | acagatttta atattcttga agctaaatta attcttatta aaacaaaata ctatgtgatt |
| 87301 | catcaaataa agagaacaat taaaatgata aaatatagca acggaaataa tgtagaaata |
| 87361 | gagactgctg atgaagtata tataaacttt ctgcagggca atatgacaat aatagcaaaa |
| 87421 | ataaatcttt aaaatattgg gcaattcttt agtttgacaa ttctaattct agaaatatat |
| 87481 | agtaagaaaa caacccagcc ttgctataaa gactctacac aaagatattc atcacaatag |
| 87541 | tgcttataat gtgaaatctg gggagagctt caaatattta ataatagaaa attgcttaag |
| 87601 | tgtagtatat tcatgtaagg aaatgccatt aaaatgttat atagagaatt gtatttaatg |
| 87661 | gtaagaaaag tgttcatgat gcaatatact gtgaaatttt aaaagcagat tataaaatat |
| 87721 | taccttcagt ataatctcat tgttgttagt aaaactcctt ctctctctac atacacactc |
| 87781 | tcacacacag agacagaaaa attatctctc aatggcataa ttattgacag ttcgttttct |
| 87841 | cccccttgct tattattatt ttgtaataga tatgctatag ccactcaata aatatttgtt |
| 87901 | actaatttca aaaagtatgt attattatat ccaggttgtt catggaattt atcatgcaaa |
| 87961 | caactaccct cttgagagag tcaaaagtgg acactataaa ttatgaattc atataaacta |
| 88021 | tatcaggaca atgggcataa actgagtgtc ccaggcacgg caaaatgtgc ggataccctg |
| 88081 | gagatgtatc ttgactttaa gaagtttaca atctttcttg gggatagaag attaaaaaac |
| 88141 | atgaaaccat tagaaataat ctcccacaat tagttttgta aaagcaagtg cttaattgta |
| 88201 | cttgacaaac attagatgtt actggaggtc taagaagtaa gagctgaata ctcgtcagaa |
| 88261 | aagctccctg gaggaagtgg ggactgagtg atacttttag aataggtaag aaaaagaata |
| 88321 | atgagaactt ttcaaatgga ggttggggtt gtagaaggaa aagaatcaag tattcagagg |
| 88381 | tagctgataa cgatgttgta tatataaaat caccctgact tttgcaaggg gtccgtctat |
| 88441 | acagaagagt aaaaagtaaa caatctatta acaatgtact atcactgcct ccactttaca |
| 88501 | caggagaaaa tcgaggcttt agaaggttac ataacctgcc aagggtcaca tagctaaaag |
| 88561 | tggagagctg agatttgaac ctaaggagtt ggtttcagag tctatgcttt ccaccctatg |
| 88621 | ctgtactgcc cactacagtc aagctctggc ttcttgtata aatctgatgt cactctttgt |
| 88681 | gggactgctt ataacatttc ctcacccaga atccatacct cctcctttct gctctgtcag |
| 88741 | agctctttgt ctattcacac acagttcaaa gaataccttc tccatcaaat ttttctaaca |
| 88801 | attccaatct tggaattctc tcctaccttg gagttgagaa caccactctc ctaaatttct |
| 88861 | gcctacttct cagacactac ttctcaatct ctttgttgga ttcttctttc tctatatttt |
| 88921 | tSttttttta gtctactcat tgcctgtgtg agtaccttca cccccaaaac tacaatacct |
| 88981 | acctaccatt gtgctgaaaa ccccagctta cattgctctt ccacattcca taaatttcta |
| 89041 | tctggatgtg cacagacacc tcaaacttca tatttccaat actggcattt accctatctg |
| 89101 | cagtttttac tatcttatgg acagcagatg ccagaaatct aatcactgaa accagaaacc |
| 89161 | catgtacaat tcttgagtcc tccctctctc aagcctaaaa tcctggaagt caccaagttc |
| 89221 | tgtctatttt actctataaa taactattag attcttcttt catctgaact cccttagttc |
| 89281 | aagccctctt tgtttctcat atgattattg tagtaggctc tgaactggtt ttcctggtac |
| 89341 | ctgtctttcc cctgcctact ccaattctac ctccacatca acatttctca aatttgaggg |
| 89401 | gtcatagact tccaaggaca tttccacaat ccctgagaag tatacagttt ccatatgaga |
| 89461 | aatcactgta gctaaaagtt aaatactttt cttcagttga ttatgtatag ctaaggcaat |
| 89521 | aattcaagca ttagtaaata caaagccaaa atgcaggcac attacgcaga aaatgcctgt |
| 89581 | tcttgggttt ttaaaaaata cgttaaaaaa ataaggccag atgtggtgac tcccacctgt |
| 89641 | catcccagca ctttgggagg cYgaggtggg atgattgctt gagaccagga gttcgagacc |
| 89701 | agccaagaaa acatagggag accttgtctc tacaaaaatt tttaaaaatt agccaggcac |
| 89761 | agtggtgcgt gcttatagtc ccagctactt gggaggctga ggcaggagga tcgtttgagc |
| 89821 | ctgggaggtc aaggctgcaa tgagccatga ttgccactgc tctccagcct gggtgacaga |
| 89881 | gcaagaccct atctcaataa ataaataaga ccacaaagga aaaaaattct tacagagaat |
| 89941 | tattgaagta taaattgtgt caaaattgaa gaatataata aaccctaaga ttaatagtcc |
| 90001 | tgtccttgag aaagatcatc aagtgatgcc cccatgcttt aaaaaatatt ccaagctttt |
| 90061 | tagcataata tctaacattt cttagcagtt cctaataggt tacttctctg tagttacctc |
| 90121 | tctcactcct tccccatcac ctatagtgcc acaatctgta acctgtttga ggctctctca |
| 90181 | cacctttcat actgcaatat ttgctcgaac tattgacccc caaccttact catctttcct |
| 90241 | ttctaactaa ctaacttctc ctcatcctca aagccccagc tcaagaattt tcatttctgg |
| 90301 | aagaatctct gattttcttc tcttctctag tcttgaaatg gtatgtgtga acccacagct |
| 90361 | tgttgtaatg tcattgtcct ttctgtttaa caccctcagt tgctggtcct tgaagtctgg |
| 90421 | gactgtctta atctacttta aagtcttcaa gccaagtaca attcctaggc atgcaataca |
| 90481 | tgtttgttaa atagatggat gacctttatt tatatttatc tttccctttt ctgctacaat |
| 90541 | tagttaactc attcatttct tcattcacta ataaccactt atctgttatt ttctgggaat |
| 90601 | acaaaaattc ataaaacatc atccttgcct ccaaaaaaca ctttattatt gtgccatcct |
| 90661 | tctctctctt tctctttctc tccttctcta attatctagt tgtgtaggta ttttcttcaa |
| 90721 | aggaataaca ggtactcaga ggaacactta tacactgttg atgggagtgt aaattagttc |
| 90781 | aaccattgtg gaagacagtg tggcaattcc tcaaagacct aaaaacagaa ctagcattca |
| 90841 | acccagcaat ctcatttctg ggtatatgcc caaaggaata taaatcattc tattataaag |
| 90901 | acacatgcat gtgtatgttc attacagcag cattaacaat agcaaagaca tagaatcaac |
| 90961 | ctaaatgccc aacagtagta gacaggataa agcaaatgtg gtacataaac accatggaat |
| 91021 | actatgaagc cataaaaaag aatgagatag tgtcctttcc aggaacactg atggagctgg |
| 91081 | aggccaatat ccttagcaaa ctaacacagg aactgcatgt tctcacttgt aagtgggagc |
| 91141 | taaatgatga caactcatgg acacatagag ggaaacaaca gacactgtga cctatcagag |
| 91201 | ggtggagggt gggaggagtg agaggatcag gaaaatcaac taatgggtat taggtgtaat |
| 91261 | atgtgggtga tgaaataatc tgtactacaa accccatgac acaagtttac ctatgtaaca |
| 91321 | aatctgtaca tgtacccctg aacttaaaag ttaaaaagaa ataaaaaata aacagaatag |
| 91381 | tagggattca ttacaatatc ttctctcctc ctcataattc ttaaacctgt gtagaagttc |
| 91441 | aatacatatt tgtggaatag ccttattacg cctttaggga atggagcaat gccttgccta |
| 91501 | ttaatctata cttctatcag agtttcctgc tgtatggaaa acctgagtgt tacacttcaa |
| 91561 | acaaatgagg caatttatac atttttgttg ttgttgttgt tgttgttttt ggcataaatg |
| 91621 | tgctaagtga gctggagttt cagaagagaa actgaatgtt atatgtgaat ccaggtcagt |
| 91681 | agcttggctc tgactacaat actgatttca ttcaagataa ggaaactaat tggtatcaat |
| 91741 | tttagttgac attatatgtt agttttataa tattcaggaa tttttgaagg attatttgat |
| 91801 | ttttattttt atagatgttc ttgctcttta acactaaata atgaggaaag ataatagggc |
| 91861 | taacatttat taagcattta tgttggacag gcactgcttt aagtattttt atatgtatca |
| 91921 | actcattgaa ttttcacaac tcttagatct atttgatagc tggggaaact gaggcacaga |
| 91981 | gaacctcaag taacttgccc aaggtaagcc agctagttag catggaccag tgattcaaaa |
| 92041 | acaggcagtc tgtactcctt acaactgtat tatgctgcct ataaaaggac cactagacta |
| 92101 | ataattatga aaccagattt ttaatcttaa attagccata taatagtaga gtgcatttaa |
| 92161 | ggatgtcatc tgagtttcat tgtccttgta ccccttacag cctgtgagaa ggaaccttta |
| 92221 | tatagtcttt cataaactgt aaagtgttat aaattcaaag atttcttata atatgttaaa |
| 92281 | attactttta agagttgaga agtccaaata aaagcagaga gatgagagga aacactagca |
| 92341 | ctaaatgttc agacacccac tgaccaYgtc aagctgcaca ttttgttgct aaacctaagg |
| 92401 | gagagattag atatgaggag agtgggaagc aagaaggtat gaagtctggg tatttaggga |
| 92461 | ctaatagaaa tgattttctc gattagttta agaacattag caattactta cgggataagc |
| 92521 | acagttaaag gaatttctgg aaggaataaa actataaaaa ttagtcaaat tgttaaaata |
| 92581 | tcagaactgt gtaaaagcat ataaagtttc atcatatctt tcttttgaaa aacaaacaaa |
| 92641 | cacttcatgt tctagccagt tgctaatagt gatcagttga tgaatacacc tcatgtttca |
| 92701 | cgcatataaa attttacacc atgtctagtc cataggcatt agtgtaggag tcagaataca |
| 92761 | acctgaattc tgttcgcagc tttgtgcctt gtcgataaag cagtggacat ctctccacag |
| 92821 | ggagatatgt ttcctcccgt gatatagagg atgttgattc acttgtctcc tctctatttc |
| 92881 | gaaaagatgc tctgaagatt agtgagacaa tggctgtaaa gCtctttgca ctgtttacaa |
| 92941 | cataaatcat acacagacat actggcatga gaaacgctat catcatctct tttatacatg |
| 93001 | agaacaacca taaggaaaac aaacctcaga gacagtcctg tattataaaa atgttgggta |
| 93061 | gagatgccaa aagttgtagg gtaggaaaca gcaacaacaa caacaagacg gaatccaaag |
| 93121 | aatatttgca ttctataata tattctacag agtYtcagac gggaccttcg ttgagtgctc |
| 93181 | ccaagtatta tcagtagcca tgtttttttt ttctttttct tttttttttt tttttttttg |
| 93241 | gtaaaaggga taaatagtga tgtcaggaga tgctgcaaaa tatattccag tgataagcat |
| 93301 | atggcaagca attaatggat gaattcgcct ctcttattgc catgttgtga caaatactct |
| 93361 | aacttatttg gcctttggct ccctaaaggg tgctcagaaa tgctgtttag aaagtacttt |
| 93421 | tcatgaagag ctacaacaac aacaaaaaca aatacaattc aaatatctac taaacatatg |
| 93481 | aaggagtact cactctcatt agtaatcaga gaaatgcaat gatcccatta tagagccctg |
| 93541 | tcatttgaaa aaaaagaaag aaaatccaag tgttttttat tagaacgtgg agcaacagga |
| 93601 | attctcatta ccttctcaac cactttgtca aatgctttct gcttatctgc tgaagttaaa |
| 93661 | gatatgcatg acccatgaat ccactcctag gtatattccc ccacaaaaat gtacgcttat |
| 93721 | gtgcatcaag atacacgcac ataagtgttc gaaatatctt tattcataat atttccaaac |
| 93781 | tggatatgtt caactgcata aagaaagaag attggacagt aaattgtggt tcctttatac |
| 93841 | aacagaatgc tatatatcat gatatatatt atgatgtgca atcctcagct acatacaaca |
| 93901 | ttgatgaatt ttacaactat aatattgcac aaaaggagca aaacacagga gtatctacaa |
| 93961 | gatgagtcca tttacataaa atgcaaaaca aactaaattg aactgttgtt ttggcatgca |
| 94021 | tacatacgtg gtaaatcata aagaaaagta ggaaaagtaa aagtaaagtc aagatagtgg |
| 94081 | tgacctatct ggagaggatg aaacaggaaa ttatagggtc tttctgaggg gtgatcatag |
| 94141 | taggtattta ctttagaaca atttgttaaa cttaaaattt aaattttaca tactttctta |
| 94201 | aattttgtta tatttcacaa tttaaaaatt tataaaatga taattttaca aagcctaaaa |
| 94261 | gatgaattat ttgggggctt ttacttctct ttcatctgta caactgctga tgaaaatcac |
| 94321 | caggtgtgta taacatgaag catctcctta aatgacatgc atttattggg aaaaaacaca |
| 94381 | aagtccaaat ggtaaaatgt tagcaaggta aaacactgaa gatttttctc cccaaaactg |
| 94441 | ccaaacaagt ctggtttaac tgaaattgac agcaaagaca acagagcaca cttaattgaa |
| 94501 | ttttaatctc agtgatctct aagccatgtt tgaaacataa acagacatgt cagagttctt |
| 94561 | tatgatgttg gacatgaatt cattttcata attcaaaggc atactttgct tatgaatctc |
| 94621 | tttaacaagc tttggctgaa tattcttttc ttccagatgt ttgctgttgt atacacacag |
| 94681 | cttccatctc tttgcagatg atttaaaaca tagttagaaa gagtacattt atttaacaaa |
| 94741 | agagtaagag tacagaattc aaatagatcg tctgtgggtg tatataatga tgagtacata |
| 94801 | agtctcatgc agtcctcata aagacagcat ctattaatct gaagaagttt ctcttactaa |
| 94861 | tttgcaaacc taaaagcatt ttacattact aagatattaa taaataggtc aattaatact |
| 94921 | tttgatagag tagagagact cctaaataat ggacatgaaa aatgattttg taaaagtaYg |
| 94981 | gtttcatttt aaatccctgc ttaagcaatt tgtaggaggc aagatagtgt ggcagttgag |
| 95041 | aggatggtct ctgaaatcag atctgaattt gaataccacc tctaccattt actaacctaa |
| 95101 | acaagtcata ttacttctct gtgtctcaat agctacttcc tgaggtgttc ttacaaaaac |
| 95161 | acaaataaat aatccatgta aagaactttg cacagtgcaa atacatagtg agcacgcatt |
| 95221 | gagttttatt tatcatcatc atcatcttgc tgtacttttg taaactcacc ttctcccgtc |
| 95281 | tttttctact ctaaggtgct cttccaagct actttcctcc tcagctatcg ttcccctgga |
| 95341 | tttccagtaa gagagggtga aatcatgcct gcttatcttc tttctctttt actgatactt |
| 95401 | cactgaagtg aaagtaaagg aataaaaaca caacacaccc acccacaaag gcacaaataa |
| 95461 | taaaggaaac aagatcagca aaggagagat ttctactgat tttttgaaat cagaaaatag |
| 95521 | ctgaagtgcc ttagcataat cgaggaaatg gttacggaga gtaaattcca agagaaagtg |
| 95581 | gactaatgtg ttctcccgaa tccagaaaga cttactgctt ggaggcagca gaattaagga |
| 95641 | aggcaggagt ttagcgaggg gctgaaagtg tattaaaatt atatggagcc tttggatcca |
| 95701 | aactaactac ttcccttacc tactggaagc ggagtctttc ttttttggag gaaatcggct |
| 95761 | agagagattt gaaactgatg atactaggca ctgtagcaaa ctaggagagg ctgcaggttg |
| 95821 | cgaaataggt gcttatttga aagcctatag agtttgcaat aagaaaccca acttttttat |
| 95881 | ttgtcatgct ccccagacat tagcagtcag ttatatgccc caggcgcaaa tctcgcaggc |
| 95941 | agaaagtggg gtacccccta atcatgacct tggggaaaca tttcaaagaa cacaccggct |
| 96001 | ttgattgaac aacctatgat gcaacagtgc aaccctacag ttgacgagcc ctatccatga |
| 96061 | tcacagaact tctgacattg tttcttgcca tcattgtcat tgttgctttg ttttgtgtgt |
| 96121 | gtgtgcatat gcacctgtat atgtcttgct tttaactaag aatgaacagc ctcttaagga |
| 96181 | aactctccat aatgaagaag agaaactaga agaagcaaac atcaactgaa gaaagaaatc |
| 96241 | tacaggaaag agagagacag aggaaaacct caagaggata ataatctgtg accttagata |
| 96301 | aaacacactt ctgacataag aacatatacc attaaaaagg agaggatgag gctgggcatg |
| 96361 | ttggctcatg cctgtaatcc cagcactttg ggaggctgag gtgggcggat catgaggtca |
| 96421 | agagatcgag atcaccctgg ccaacatggt gaaaccccat ctctactaaa aatacaaaaa |
| 96481 | ttagctgggt gtggtggcat gctcctgtag tcccagttac tcgggaggct gaggcaggag |
| 96541 | aattgcttga acctgggagg cagaggttgc agtgagccaa gattatgcca ctgcactcca |
| 96601 | gcctggtgac agagcaagac tccgtctcaa aaaaaaaaaa aaaaaaaaaa aaaaaaagga |
| 96661 | gagaatgaga gtgctaaatt atttttaaat catgaccaaa ataaacattt taatagtaag |
| 96721 | gttggaaaat aaaaatgtgt gtgaacaaat cttctagaag accaaaaaac aaaaagacaa |
| 96781 | aaaaggaaga aaacaattaa gaaattaaag gatatgatct aggagatcca actaagataa |
| 96841 | tgagaattca aggaagaaag aacagagaaa atagagggca taaaattatc aatgaataag |
| 96901 | agcaaacatt tcagaactga aggactcata tctctggagt gaaaaggtct attgcgtgcc |
| 96961 | cagggcaatg gataaaaatg cagaccaaga caattgatca tgaaatgtgg gaacttcagt |
| 97021 | aaagaaaaga aggtcacaaa aatttctaca cagaaaaaga tcaggatttc accaatagaa |
| 97081 | aatactggag tgatgcctac aaaatgttca aaaaaataca tttttaacat agaatccaat |
| 97141 | tgcagttaat ccatgcctga gacaaaaaaa ggtttaaaca aagggctgcc tctgaatagt |
| 97201 | atatagaaaa gatttctgaa cagaaaatct taaaaactag cttttatccc caacttggat |
| 97261 | actaaatata gagacaggca agaattaggg gtcttcttgt cattcttctg agactctgga |
| 97321 | gctcctgaga cttctttttc actaacacca ttgaatccgg gaatcaacaa gctgcacaaa |
| 97381 | gttataaaga ttgccagact tcatgtttct ggaaaaaaaa aagtactatt ttttcataca |
| 97441 | gctgagacct ctgaaaagat ggctcaatgg gcaagatgcc atgagaaatc aaagccaaat |
| 97501 | actcattctg aagtcagttt tgctcagact ttgtatactg ccactcaatt tttcaagtca |
| 97561 | tcagaaacat aactaagaat gagtgacttt ttgctatYaa ctaatgaccc accattcaac |
| 97621 | gatcttgtat gacaaagtag aggagtatct tcttattttt aggcttatta aattacaatg |
| 97681 | gaaaatattc attaacaatc tcataatgag gcattctaga tgcttattct tacctaaagg |
| 97741 | gaatggaaca aaaaataacc aaaaactaaa aagatgaaga caaaagcctt tcttggtatt |
| 97801 | atagtattct tttacaaagg atatggttta tcatagtaat tgattccctc tgttacacta |
| 97861 | gagatactat tatattaaat gcctaaaggt taaacttagg taacagtgga gctatagttc |
| 97921 | tttcagaaat aaaataatta aatagctatg tatgccaaga aaccttactt tgaacatttc |
| 97981 | tattgtacca tctcattatt gctggctgcc tgattagcaa gcagtaaact tgggtaatag |
| 98041 | ctttcctctg atatcacttc aagtctactc gagttctaga attacccaga ctaccaggac |
| 98101 | tttacttgca caatatgctg aaatgtttat aacattatgc tttcccctcc taattctcaa |
| 98161 | gaccattttg ataactggct aagactggat aatatcaaca aatatgaaat aattataaga |
| 98221 | atcattcttt cttaaaataa gaagagtttc cagaaacaga aactaaaaca gaattcaggc |
| 98281 | taagctgcta aataggctat ctcagggatt ctcagctcat tcttgatgag gatagattgc |
| 98341 | tttttatttc ccttaagtgt tccgtattta tttcacaaat attacttaac tgtgtaccat |
| 98401 | gtacaaagcc gtgtgctagt taagctggtt actgtggaag aaataaaggg agtgggagca |
| 98461 | tctagctttt ttcttcaaag gagatggggg aatctgtggg agttagtggt aggggcacct |
| 98521 | acagaggaaa tWgctgaaaa ggaggagctg gggaagatga ggatgaggaa ctaagttgtg |
| 98581 | aataaaggaa gggcagagca atggtttttt taataatatt ggaatgggat ttgtttttag |
| 98641 | cactgctccc ctttccctta acagtcccct tgagctacaa ataaatgtaa ctggcaaagt |
| 98701 | ggataataag acttcagaat cttctagcta accatgatca atgtgtcatg |

[0317] Following is a genomic nucleotide sequence of a GPX3 region (SEQ ID NO: 5).

| >5:150384801-150484800 | |
|---|---|
| 1 | ggcttatgtc tacaatccca gcactttggg aggccgaagc aggcagatca cttgaggtca |
| 61 | ggagtttgag accagcctag ccaacatggt gaaaccctgt ctctacaaaa aaatacaaaa |
| 121 | ttagccaggc gtggtggcac acaagaggct taggtggaag aatcgcttga acccaggagg |
| 181 | cagaggtttc agtgagccaa gattacccca ctgcactcca gcctgggtga Yagagtgagg |
| 241 | ccctgtctca aaaaaagagg aagaaaggaa gggagggaag gagggaggga ggaaggagca |
| 301 | catacttgtc tgaggatcag taataatacR tataataata acatctgact ttcattgaaa |
| 361 | acatattatg tgccaggtag tattctgagt gcttaaatct attgattcat tctgtcctca |
| 421 | caactacaag gtagtcactg ttactattct tttttataga acagaaaatt gaggcccaaa |
| 481 | gagatcaaat aacttaccct gtccctaatt agtaatggag ctaggactca gaccatggta |
| 541 | agctggattc agagcctttg tacttaattg caatgcctct tScatatgYg ctaggtaggg |
| 601 | aacaaggtga tagcagaatt taatagtcag gattgatgca gtattcctga actagtatag |
| 661 | aatgagctag attaaaaact cagcaattag aattcagtag cgaatcaaat cctgagataa |
| 721 | gtaggatttg gcttatcctg tggccaattt tcctcgtatt aaacatataa attcatgggc |
| 781 | cttcacaccc ataaaagaat aaattagtat tataattttt aaaatatgat taaaattagt |
| 841 | gctttctgaa gtactggtta ggtgtttctg tttgcaaaga gaatttatgg ttttgtaaga |
| 901 | ttagtttaat gttgatggtg gaatagacaa gagccaaaag acactagaag caaagagaaa |
| 961 | aatgaaaatt aaactatagc aatccagcag ttagttaata aggctgcagc tcagatattc |
| 1021 | ctgttcctca tccagtcctt actttttttc tccaatcacY gttgtYaccc tggtcagttt |
| 1081 | taattctgct aaataagctc tccccactga ccctgttgca actgtccttc tttgttcctt |
| 1141 | tttactattc ctcaagatta tttagtgttt ctgcccagtt tgcaaaatcc tatttgtata |
| 1201 | tagccatata tactttgttc attgtcatat tctgtttctg tttctactac tgcaattttt |
| 1261 | aaaaaatgtg gttttctttc ttgaaatgct cagggggata gactccattt Rgccttgata |
| 1321 | tttcttgtag gccatatgta tattatgcat gaaagtaaag attcaatctc ataatatgac |
| 1381 | aaaaagttat gagtcataat acattagcag atatatttac cagtatatag ttaattgtgc |
| 1441 | ttctttctag aagtctggca agacttccaa ccacatgcag aggcaccagg agaaccaata |
| 1501 | aacacttttg aggcatgttt cattaataga ccagggaact gagacagagg aaaggKgtga |
| 1561 | caactgtaat gctcttgaaa atatatttca tctgagccca gactttattt caaaaattcc |
| 1621 | aaaaatgtgg ctgttatggt aggaatttga actaYttgga tttatttagt ggcaatagaa |
| 1681 | gatatgccac aMaaaaaaag agcatagtga atgtgaaaaa gcctccttcc agaagtcaga |
| 1741 | cctcattatg caaaagagaa ccataagaga gaaaagccct taatatgtac taagtgtggg |
| 1801 | aRaaccttca gcagggaatc aaatctcatt atacacctga gaatccatac tcaagagaaa |
| 1861 | acctacgagt gtgttgaatg tagaaaagct ttctcccaca agtcacatct gttgaacgtt |
| 1921 | agagaattca caccagggag aaaccctatg agtgtggcga gtgtgggaaa gcctttttcc |
| 1981 | aaaacttaca cctcagcatt tacaggagaa ctcatactag aggaaaaccc tatgtgtgtg |
| 2041 | atgaatatgg gagagccttc Wgcctgaagt cacacctctt tgtacatcag agaatacaca |
| 2101 | caggagagaa aWcttatgtg tgaactaagt gtgagagagc tttcagtgaa gtRtcatgcc |
| 2161 | ttattagaca tcagaaaatt tacactagag agaaacctta tacatgtaat gagtgttaaa |
| 2221 | aagttttttc tcaaaagcct gacctcatac attacagaat tcacacaggg aaaaaaactc |
| 2281 | atgtaaatgc agtcaatgtg taaaaaaaag ccttcagaca tagatcagcc ctctgtcgac |
| 2341 | ataagaggac tcataaagaa aaacatccct gaacaagaaa taaatatggg aatatcttta |
| 2401 | actagaactt gtagtgatag aaagccttca gtcaaaagca aaccttatta tttatcaaga |
| 2461 | aatcttactg aggataagcc tgtttaatat atttataaaa gcgcgcagtt atgtttctat |
| 2521 | agaaaacata ttccagatgt gattcctaaa tatttcttga ggatattaca gaaaatacat |
| 2581 | ttttattaga gaataaatgt tcactgtgga ccacaaaggc ttttaaaata ttaataagtg |
| 2641 | aactagtcag aacaaactta gaaaacRata tgtggacaac ccacaagata tgaatgttac |
| 2701 | tatatgtgcc actacttatt gctgtaagtc ctggctgcac tacattttgc tatgcatcat |
| 2761 | ataaaataag ttatatgtgt tggaattgca tatgtgaatc taaaaatttg taaatataaa |
| 2821 | ataattacta tatatagaat gccatttact aagactttct acattaaata ttaccatttt |
| 2881 | tcccctaaag aaaatacaag ttataaccaa aaatacagtg ttcagtaaga gttctaaagt |
| 2941 | gtaaaataaa cttttttctg ttgctttctg gtatgtatga cttctgctgc ttcttaatga |
| 3001 | gaagtacata aaggtgttaa ttacataaaa tatataaata taaactagat atcatataag |
| 3061 | tctcagtagc aaaagaaaat agtcatggcc tcttacaaga ctcactgcaa tttaRaaagg |
| 3121 | aattcttggt gggtacaatt acccttttta catactgtta tggactgaat tgtaccttcc |
| 3181 | caccaRattc atatgttgaa gccctaatca ccaatacctc agaatatgac tgtatttgga |
| 3241 | catactgcct ctaaagagta attaaaataa aaccattagg atgtgtccta atctaatctg |
| 3301 | actggtgttc ttacaagacc tagagagtag gacacacgag gagacatcag gggcaggtgt |
| 3361 | acacagagaa atgaccatgt gaagtggcag caagagggct gctatctgct agccaagaag |
| 3421 | agaggcctcc aaggaaacca acccttttgc acattgatct cagacttcca gcctccagaa |
| 3481 | ttgtgagaaa ataaatttct gtcatttaag ccactcactc taatattttg taaggcagcc |
| 3541 | ctaggaaaca aatacaaaca ctactgctct ttttccctgg agtactttgt aagcttgagt |
| 3601 | atacaaagta taagtactac gtaagccaat aatatgatag agtgcttgct atactgcacg |
| 3661 | gcatctctat ttggcatttt ctaattcacc ttgtgacaga ttagtaagag agatattttc |
| 3721 | ataaggattt tacaattcac aaatattata aagacttttt gcagagagaa ttgttcattt |
| 3781 | ttaaaattcc atctaacagt aggggtaggt attctgtaaa tttccatgtg agtatccatg |
| 3841 | ccattaaaaa tcaacttgtt ccttatttat aaattaaaag tggggcctca ttcttctaaa |
| 3901 | gcaaattttg acagggagtt aagattacaa ggcagaaacc tacaagaggt gttaagagct |
| 3961 | cttattctgg atttagacag atgtagattc tgaatctgct ctgagcctca atagcaccta |
| 4021 | gtttgttgga tcattgcaag gattatacaa tatcatgtat gtatggtgct cataagatgt |
| 4081 | tagctatttt atattattta aggatataat tcocattcta gttatgaaga cagacaagga |
| 4141 | aacaactcta attaggatta tattagagag aactgtaggg agtcatgtgt atcattctgt |
| 4201 | ttcattctca caaccatgtc agtctttcag actcaggtgt gggcctggaa ccactgccct |
| 4261 | gaattgcccc tctacatcta ttctataatt gcttgttcag aagcaatacc attgctgata |
| 4321 | ccccaaactc cttatcttta tctcatctac tgatgagacc cattgcttgg agggtagtta |
| 4381 | catggaaagc cattcacaaa acaccttatt aactttgtgg gtgaaaaaaa agtgtatctt |
| 4441 | aattgtatta agccactgag atttagggat tgattattaa tagcaaatag caatcatttt |
| 4501 | ctagtagaaa gaaattggtc ctggaagtgt cctgctaatg taataaaaac ctaaaatatg |
| 4561 | gcataggcct agtagttgag cagtgagaaa actgatgtca gaagtggaaa gatgtttatc |
| 4621 | tatgttttgt actagccaaa catttggttt gggccaggcg tggtggctca cacctgtaat |
| 4681 | ttcagcactt tgggaggtca aggtaggcaa attgcttgag cccaggagtt caagaccagc |
| 4741 | ctagacaatg tgatgaaacc ctgtctctat aaaaaataca aaaattagcc agatgtggtc |
| 4801 | gtgtatacct atagtcccag ttactcaaga gcctgaggca ggaggatttc ttgagcccag |
| 4861 | gaggttgagg ctacagtgag ctgtgatttt gtcgctgtac tccagcctgg gtgacagagc |
| 4921 | aagaccctgt ctcaaacaaa acaaaacaaa acaaaacaaa acatttggtt tgattgtctc |
| 4981 | ctctacacat gcttactttg ttgacagctc cagaagataa ttagaaaaca gagtattagt |
| 5041 | aatatttgct gttttactgg ctgtatttgg aagctattgt aagaaaaaga taaactcaga |
| 5101 | gaaaattagt ggattataag caaaaatgaa agaaaataga gtcctgaaat ttgagacctc |
| 5161 | atggagttta aaaaatttga tttctagact tcaaatgtta ggagaataat ttaaatggtt |
| 5221 | ttgagtgtat caaagaccta ataaacattt gctagtgaaa taaagtgact cagaagaaag |
| 5281 | attatattaa gaaactgaaa ccttctcgtt caagcttgat aaccttacag tagtctgtta |
| 5341 | ttcacctacc ctagctccat gatggagaag ctcaatttta ggcagctaca gccaagaaga |
| 5401 | ctggggctcc catacccaac ctagctccca cttgtagagc agaggctctt gccaaggtaa |
| 5461 | gagaggctaa gagtattggg acctcaattg ccctcctcct cagcttttct ctatagagta |
| 5521 | gatgtttcat gccaggaaag gcaagccaaa aaaaagatca ttctcccagc tcccactaat |
| 5581 | aggatagagg ctccagactg gcaggagtac attaaaaaga Yctcaggcct tcatcttcct |
| 5641 | accaagatct cacttgcagg aaggagtatc cctgctaaga agcttccccg gattccactg |
| 5701 | gtagggcaga ggtgtcactt caggaaaatc cggcKttccc ctttgtcccc cgcttctgtg |
| 5761 | caagagtgta gatgttatat ccagggaaag aagcaagatg ggagggccag aagctcctca |
| 5821 | gctcagctSg ggggctgact gtatttaatc ataacatgaa gggttgcatg aattaaggca |
| 5881 | ttgttgaaaa tagagatctt agtggcaagc acttaagaga attctaatag tttcataaaa |
| 5941 | caagtagcaa caaatgaaac agcaagtcac ccggtttaac agagtgaaca agagaaagag |
| 6001 | ctaaaactgg aagtctgtgc atatgtctat gtttcacaca ttcaggacca accataacag |
| 6061 | gtactagctg aacttgagtg gaattgaaag aatttcccaa gccacacgct gatacattag |
| 6121 | caaagagtgg aagtcttact agctcaagga gtgtaagcac aacccctgac caaacactgg |
| 6181 | ctaaatgtta agatattttg acccaacggt gacttctagg aagccaggct tggggtaaaa |
| 6241 | gctacacact gtggggtggg gggcggcggg gggaaataga gtttacaaag ttggtgcaag |
| 6301 | caagccacta aacaaactaa caaaacagag ccacatcaat aatccctaaa ggggatgtgt |
| 6361 | cagaatccag agttgctaca atatattatt tcaaaaacta ttagagatgc aaaagaacaa |
| 6421 | aatagtataa cccttgtaaa ggaaaaacag catcaataaa aactgctttt gaggaggtct |
| 6481 | agatgttgga cctgtaaggc aaagatgcca aagaagctat tacaaatatg ttcaaaaaac |
| 6541 | taaagaaaac catgttcaaa gaatgaaagg aatgtatggt gacaatgact catcaaatgg |
| 6601 | agaatgttag tagaataaaa agtgtttaaa gactcaaata aaaattctgg agttgaaMag |
| 6661 | tagaatacct gaaatgaaga ttcactttag gtactcaaaa gtagatttga gctggcagaa |
| 6721 | gaatcagtaa gcttggggct cgatcattcg atattataca gtcttagaac agaaagaaaa |
| 6781 | aataatgaag aaaacctgag cagacttctg gtttctagtc tgacatgtaa agagcttgga |
| 6841 | agttgtcaat cctatcatca caaccagaaa aaagtctgaa aaactggaaa ttaacaattc |
| 6901 | ttagatcctt caaagaatca aggtcacagg acaaaccact gccccagaaa ctagagagac |
| 6961 | aggtagatgc tgagaatcac aggttcactg acagcggaag tccaccacta aagtcaatat |
| 7021 | attttaggaa cacttaaact acaattgatg aattgctaga gactagcaat aaaagtgcca |
| 7081 | gcattctagt tgatgaaaat gttgtgacca gaggcttaca tgaacctaat cctgtattcc |
| 7141 | tcttggagca attattcagt atttactaat acagtgtttg tggtggattt atttaacata |
| 7201 | agtactgtga ataataaaat caactgtata tgaaatcttg actatccatt tacatgtagg |
| 7261 | agaatcaaca aatggtattc tccacaaatg gaatcaaccc ctagaagttc ctgagaaatc |
| 7321 | cctgttgagt gggaaaggac ctagagccaa ggagacaagg ttggaggtga ctggtcctct |
| 7381 | tcctttgttc ttccactgaa attacttgag aagcatcatg acacatcctt atacacaggg |
| 7441 | tatggtggaa aaataattgg cagtcaaaaa gacttaagtg tatgaagact taagcatgat |
| 7501 | acacatggag aaggtgatgg tgtaaagaat gacaatggcg tctgagtaac attctgaagg |
| 7561 | aggagggaag ttcaaaaggt gggatggtgt gcctggatga gacacatgag ggagaaggat |
| 7621 | tttctatggt gcttctgtta gtttagcagg tagaatgccc ctgtgaaggg tacaggaagc |
| 7681 | atgtggcaga gtgggtgcct aagtctgggt ttagggagac tttagaaaca atttgaaacc |
| 7741 | cagggtctta ccctctgttc acctcataga acagtaaaat cccttggatc aggcaaactc |
| 7801 | tgatgaaaaa cccagactgc catctctctc ccagatggcc aattttcctt ctggtgctgg |
| 7861 | cgaatgatga agttgtcttc aggaaggcag aattctgctg Sgtgctctcc tcttctgagg |
| 7921 | agttatacca ccacacagcc tttgctccca gaaagagtca ccatcttgtg ttctaacatg |
| 7981 | gatcccttgt aagcccatac aaaccactcc atccatactt aactgctttc tccacaaagg |
| 8041 | caactgagtc taggagccaa tggactatct cactttattt tttaaaattt acccagggca |
| 8101 | ctttttcatg ttctttcttc tccctggaac ttactagcat tatggaacac aaggatgtgt |
| 8161 | ttgtggtcat cttctcttta caagataggt cacatagacc cataagtagg ctgtgtatac |
| 8221 | ttttcttaca aaggaggtgt cacttacctt gggaatacca gccagccaca tatgaaatcc |
| 8281 | cagacacagg agacccctaa gaaaaaggcg aggctgtctg taactgcctt agcaactaag |
| 8341 | ccaccagtgg attcaactct taaaattaca gcaccatgga aacacaaaat cacagaattt |
| 8401 | tggatttggg taacactaga gagctcacat aattaaatac cttaatagaa aattctcatt |
| 8461 | tactaattag aagtttttaa ccatgtagtg taaccatgta tacactattc tcaaagagaa |
| 8521 | tgggaatatc ttcttcagtt acttaatgaa aacatacaag gaatctgaaa ccctaacata |
| 8581 | ccagaatcca tgggacaaaa ggaaaattat ttgatcatgg gattcagaag catttactgg |
| 8641 | atcaaggttt agagatgctg aaagtagaga atcagtgtta ggttttggag ggaaggcaag |
| 8701 | ggttaaagga agacagagag agaaacagag caactcaaca gcaaacacag gtatattgca |
| 8761 | gacacctgtg gaagcgggag acccgcttaa tgccaaaacc caccaccact tacaagcagc |
| 8821 | agtacttaca ggtatggctg ggagaagtct ggatagtgtg gcttgctgcc cggcaggata |
| 8881 | tcaataagat gtacccatga tagggtggtt tgaccctttt tctggtggga tgtcatcatg |
| 8941 | gtgttccttg ggcctttgcc cagtaagaca ggatagggag gtttctttag ttgggccttt |
| 9001 | gcctggtagg gtataataag aatgtttttt ttattgggcc tttgtcttcc ttgtggtcag |
| 9061 | gtggccaggt aggatgtttc tcatggccca aacccccgtg gaatgtttca ctttgaccaa |
| 9121 | ggtctgcaaa atagcagggg acttacaaaa tggtgccgtt tgcactaaca caaaggtgaa |
| 9181 | tggcatgggg aatggtaggt caagaaagct gcttccttaa tttatccctt ctcttgaaat |
| 9241 | gtcttcatta ttaagacttt cattttaact gcctttggag ttaaaatata aaatatgaat |
| 9301 | tttaacacag aagtgtgaat gctggtattt ttgaaatcaa gttcttataa tcccaggcta |
| 9361 | gtgacagctt gcctgggcaa ctaagtaact taagttcata agtaaacact aactctgctg |
| 9421 | aaactaaata actcatttta gcttctgaac attttaagca tttctcattc tggataagaa |
| 9481 | agagaaatgc tgaagcagaa tttatttcat ctgctttaga tgaatttagg aatcccttgc |
| 9541 | aaggcataaa actaattttg tgatcctttg agtaatatgg atttctgagg aaattctaga |
| 9601 | ttcagagaag tgctgggcca gattttggtt aaggcaatga catggaaaaa tttttcaaag |
| 9661 | aagaggtaaa aatatgtagt ggagtttttt tgtttLtttt ttttcataat caggagtttg |
| 9721 | agagggtata atggaagttg ttaggttttg acgggaaggc gagggttaaa gaaagacagg |
| 9781 | gagagagagt tagcagctct acagcaaaca caagttttat gtctagcaca agacctgcgg |
| 9841 | aggttgggga ccagcttaat gccaaagccc actgccgctt acaggctggg gtacttatag |
| 9901 | gtgtgggtgg gaggggtctg ggcagtatgg cttgctgcct ggcaggatgt tgataagatg |
| 9961 | ttcccatgat gagatggttt ggtctttgtc ctggcaaaat gtgatagtga tgttccttgg |
| 10021 | gctttttccc agcagaatat ggtaagaaat tcaggtggtt gagcaaaatg tttctcatgg |
| 10081 | cctgaatccc catggaatgt ttcactttga ccaatgtctg cgaaatgatg gggggcttac |
| 10141 | aaagtggtac agtttggatt aacattcttg ccttctactt cagtctaaaa ggaagagggg |
| 10201 | cattgttgat tatctagctg cttcctgctg aataggggca ctgtaatcag ggcttgggtt |
| 10261 | ttgaagcagt gggtgtccaa cttcagagtt gttttcctgg agatgttgat accagacttg |
| 10321 | gtggggaaag atggtatcaa tgtgtttctg ggtggctgcc tagacaaggt agttctgcct |
| 10381 | ttgggagata aagtgggata tgaaggtaag tatacatggg ccaattgtga gtattaggag |
| 10441 | gaagattagg ggccctaaga aaggggtaac cagatatccc tgtgccaagt gtagctgaga |
| 10501 | tgcttagtcc tgctaacagg ggaatgaagt gtatagccca cttggtgtgt gtggaggagg |
| 10561 | aggaaatagg gattactaaa gaacctgaat ggtttgattg ttaggcaaaa tgttaatgtt |
| 10621 | tggagattga aacaccaggg tacatgttcc tgaccaactt gccagtaggc aaagaagaga |
| 10681 | gtttgttcca cacagaaaga aaagactggg ggttgacagg caaagttgta agtgaaggca |
| 10741 | gtgagccatg agaagccggg ggttaaatcc tgaacaaact tttgtcccaa cttttttgtt |
| 10801 | tttccaggtt gaataactgt taacaaggat agtccctgtt agggcctgat agggatattg |
| 10861 | gtggtgaagg ctgtctggtt ttagacagag agagagaaat gggtttttgt taacagccat |
| 10921 | tgcggtcctg acagggaaga agaataaagg ttgcagttga gggaattgtc tgtgcatttt |
| 10981 | tttagggagt tcccttaagt tggatgcatg gagaacagtg ctggcagaga agggaggggt |
| 11041 | tgggaaggga tgttttatgg aattcagttt gtaacatgtt tagtttacag gccatgagac |
| 11101 | gaaagagggt gccagccctg cgtgcgatgg tgcaggtagg tttgatggat tgcagggaaa |
| 11161 | ggtgtttagc caagcaagat tataaacagg ttttgggaag ggactggttg agtaggtgag |
| 11221 | atgcaggttt actttggatc aagtttctgt ggttaggtta acaggaaggg ctgtgaactg |
| 11281 | ctggatttgt gtggacaaac aaatttaaca attggaagaa agaggagagt gtgactgatt |
| 11341 | taagaggtaa tgtgtgaggt tgacaaagga agcccaactg ccagaggtta tgggatttag |
| 11401 | agtatcccac agcaaagaca aaaggggaaa aagaagattt gagtacRagg gaaattttgg |
| 11461 | aaggtRccct gcagccatag ctcctgggtt aatgtgagga attggagtgg actatcoagg |
| 11521 | gatgtgggga gggaatatca ggaaagatct gaaacaaggt gtgagataac agatttgaac |
| 11581 | ttggaggcag agagtgtaat ggaccagggc cttctggact ggcaacttct ggaattcttg |
| 11641 | ttaagcatag tgaggttggt cctatgaagg aggaagaata ttttgggggt gagaaaactt |
| 11701 | gtggatgtaa gtctggtgct gtttttagtt tggaatggtg gatttagtgt ggaaaggatg |
| 11761 | ttagttttgt tgccacagga gtagtcagga ttacctggtg aggacccgtc cacttaggtt |
| 11821 | ggagagggga gaaggaattg gtgatttaga cccagttccc tggttgtagg ggcagggagg |
| 11881 | agtgtttgga ggatggactt ttaggctggg gcaagtaagc atttgcgtac cgtcttatta |
| 11941 | gatgttgagt gaggtataat gccagccaag tatcctgtat caaRgaggtg gaggggcggg |
| 12001 | ctgggggcag atacagggag attttygagg ataaaagggc attggtacat gaattcaaat |
| 12061 | gggcttaggc tgaggggcgt gtgagcaatg gcttgtaaat tcatgagtgc cattggaaga |
| 12121 | agtgaagttc aggccatttt aacctctagg aagtttggtt atttgttgtt ttaaaaaggc |
| 12181 | attgacctat ttacttttat ctgaagattg ggggcagtaa ggaacatgaa aggcccattt |
| 12241 | aatgtttaca gcctccacca actgttggtt aacctgtgaa acaaatgttg gcccactgtc |
| 12301 | taaccggatg gaggagggga gtccaaacca ggggatcata tgggtgagga gaatagaagt |
| 12361 | gatggtgtgt gccttttcgg tggtggtagg aaaatctttt atccatccag agaatgtatc |
| 12421 | tacaattgtc agaaggtacc aggcccattt tatggggacc atgagggtaa agttgatctg |
| 12481 | cccgccctgc cctggcaggt gtccttgggc ctggtgtgtg gggaaaggag gtggtttgat |
| 12541 | agctccctga gaggaagttg tttgagtgca aatggaatat gccttagtaa tacctatgag |
| 12601 | attggcagcc atggcgggaa aatatatata agcttttaag agctagagta gggggcagta |
| 12661 | accggcatgg aaatggttgt gcacatatga aagtacagaa agttcctggg acttgggcaa |
| 12721 | gacaatttta ttattggggt agaaccatcc tcctccccaa atagcaccag cccgggtgag |
| 12781 | tgaggtttgt tcctcctggg tatatacagg gtgtatgctg ggaaagatgg gcaataatga |
| 12841 | tgaggtttta agggctgcct gctgggctgc agagtttgct gagaagtttt ccttggttat |
| 12901 | ggcatctgta gccttttgat gtcccttaca atggataaag gtggccttta gtggtagttt |
| 12961 | agctgcctcc agcagtttgt gtatgagttt gccatttact atgggggttc cttttgtagt |
| 13021 | taggaaacct ctttcctgcc agattaaggc atgagaatgt aggatgtggt atgcatattt |
| 13081 | ggaatcggtg taaatgttaa ccctcttgcc tttactaggg tgaaggccct ggttaagaca |
| 13141 | actagcgcca cctgttgaga ggtagtatgg agcgggacag tgctggattc taggagttta |
| 13201 | ttttcagcaa tgatggcata gccagctgct ggacatggct ccctaaaaca gctaaaaaga |
| 13261 | tcttccatta atgaatcatg tgggtgttcc ctgcaaaggg gcttttgaaa tgtgttggaa |
| 13321 | gggggagaag agggagttta agaggtccag gcaggagtga gagagcttag agtcagaggt |
| 13381 | gtttacaggg aagagggtgg ctaggttgag agctttacat ttctagaagg tgattagagg |
| 13441 | gttacctatg aataaggcat gtatctatga ataaggcatc ctgtaagcag gatggtggga |
| 13501 | gggatagaag agatcaatgg ctcatgagat cctgtaggtt atgggaagat gcagtagtaa |
| 13561 | tgtgttggta gagagtaagt ttctgtgcct ctgaggcaag taatgtggct gcacccaaga |
| 13621 | tttttgggca ggatggccag ccttggatga tagtccattt gttttaagag gtatgcaatg |
| 13681 | gcttgtggag cattgccata tgtttggcag agtagtccaa gagcaaggcc ttggtcagaa |
| 13741 | tgtacacaca gtgaatgggg ccagcccctc cacacctgtg ggtatttctc atcaggcagg |
| 13801 | aegagagact gagaaaagaa ataagacaca gagacaaaat atagagaaag aaaagtgggc |
| 13861 | ccaggggact ggggctcagc atacagagga cctgcaccgg cccggtctct gaattccctc |
| 13921 | agtatttatt aattactatt ttcactatct cagcaagagg aatgcggcag gagaagaagg |
| 13981 | tgatagtggg gagaaggtca gcaagaaaac atgtgagcaa aggaatctgt gtcgcaaata |
| 14041 | agttcaaggg aaggtactat gcctggatgt gcacgtaggc cagatttatg cttttctcca |
| 14101 | cccaaacatc tcagtggagc aaagagtaac agcagcattg ctgccaacat gtctcgcctc |
| 14161 | ccgccacagg gcagcttttc tcctatctca gaattgaaca aatgtacaat cgggttttat |
| 14221 | accgagacat tcagttccca ggggcaggca ggagacagtg gccttcctct atctcaactg |
| 14281 | caagaaggct tcctctttta ctaatcctcc tcagcacaga cccttcacgg gtgtcagcct |
| 14341 | ggggggcggt caggtctttc ccatcccacg aggccatatc tcaggatgtc tcagtgggga |
| 14401 | gaaaccttga acaatacctg gctttccagg gcagaggtcc ctgcggcttt ccgcagtgca |
| 14461 | ttgtgcccct ggtttatcaa gactggagaa tggcaatgac ttttaccaag caacctgcct |
| 14521 | gtaaacattt tgttaacaag gcacatcttg cacagcccta gatcccttaa accttgattc |
| 14581 | catacaacac atgtttttgt gagctcaagg ttggggcaaa gttacagata aacagcattt |
| 14641 | cagggcaaag caattgttca gggtacaggt caaaatggag tttcttatgt cttccctttc |
| 14701 | tacacagaca cagtaacagt ctgatctctc tttcttttcc ctacaataca gagtagaagg |
| 14761 | cttggtggag ttgggcagtc ccagtactgg ggccattaaa aagggcattt ttcagctttt |
| 14821 | taaagtggga gttgatgggg caagctgggt tgaggggttt taggatgagc ccatgtgagg |
| 14881 | ccatatagaa cagcttggcc agcaagccaa agttgggaat ccacagatgg aagcatccca |
| 14941 | tgcagcctga gaaggagagg aggttatttt tcgtgtgggg aagaggcatg tcccaaatta |
| 15001 | gctcctttca ttgggttgga atggcctgag aattaggggt taggacaagc ccaaggtaag |
| 15061 | tgacctgcat ttgggctaac ctgagccttt gtgggtaaga ccctaaaatt tacttggtat |
| 15121 | gtcccacccc aagatagggg tagggcactg agggataaac aggaaagagt gggtgaaggg |
| 15181 | ggtgatgaat aggttgcata atagaggacc agtctgtttg tgcctagagg ggattctatc |
| 15241 | gactcccaca atagagatag aagaactgag gaggggctca gaatattctg gtaaaattga |
| 15301 | ataactagcc tcatatttaa tgggaaagac atgggcttag cagacactga cagcattact |
| 15361 | cttggttcca aggtggtgat ggtggtggga gtggeggatt ctgggcccta tcagtcttca |
| 15421 | ggtagaggtg gtgaagtggg ataaagcgtt ttgctgagca cagtctgaga tgtgctccct |
| 15481 | gtcctccagg gtgagggagg aagagaggat gacgtaagtg tcatgccagg taatttataa |
| 15541 | gattgagtga catacagaaa ttccttgtgg aaggaggtgg gatccatgga aaagaagcca |
| 15601 | agtctttttt caagctggaa gaggtcagct agggagaagg aaacataaac tcagattata |
| 15661 | ccttcggccc gcgtgacttc ccgcaagggg atgactttgg aaggcctttg ggtgtatgcc |
| 15721 | tggttttcag aggaaggggg ttaagtgtga gactgggtat gcggtggaga agaaaggggg |
| 15781 | aacagagggc aacaataagg gaKtgaagga gccggagctg aaggaggagg aggggatggt |
| 15841 | ggtgggagaa ggactgaagg aggggttttg ttgtccgggt tgaaattaga ggaggaaggc |
| 15901 | ttgtctgaag gaaggggcat ttttgggttt ggaggttcca gattagacat ctgagagtgg |
| 15961 | tgtctggagg aagttttgag gagccttgcc ccatactggt ggctggaagg gtgagaaata |
| 16021 | tagaggaggg gtgtgagtac cctggagggg agtaagtacc atgattcctc ttgggaggag |
| 16081 | ggacataaga aagccagggc atccctgcag ctcttcacag tcctctggag atcagagtga |
| 16141 | ctggagtggc gagcattctg agggcgtccc ctgagaaggc agaccatggt cacctggtga |
| 16201 | ccagggagac ctctcaccca gcactgggat tttctggtga aggagcagaa gcatgaKagg |
| 16261 | aatctggaga ggaggtaaag ggagactcac ccattaattg gagacggcgt tggacgtgat |
| 16321 | gttctgcaat gggggtgatc cttgccggag ccacccagaa agggggagaa agaaaaaaga |
| 16381 | ggctagagag tttgatcagg atctagaggt cagcccaggg ccaaaggaga gagaataaga |
| 16441 | gaaaaagggc tgcaaagagg gagtctactc aggatctgga agcaggcctc agtctaattt |
| 16501 | ttgctgcttg ctgctttcca ggttgcaaga gaagacttac ccgtttagaa cccaatctat |
| 16561 | gtcctgggtt tctgcgccaa aatgtagtgg agtttttttc ataatcagga gtttgagagg |
| 16621 | gtacaatgga agttgttagg ttttgaaggg aaggtgaggg ttaaagaaag agagttggat |
| 16681 | gctttgcagt aaatgcaggt tttatgtcta gcccaagacc tgcggaggtg ggggaccagg |
| 16741 | ttaatgcctg aacccactgc cacttacagg ctggggtact tacaggtatg ggagggaggg |
| 16801 | gtctgggcag tatggcttgc tgcccaacag gctattgata agatgttccc atgatgaggt |
| 16861 | gacttggtcc ttgttccagc agaatgtgat agggatgttc cttggacttt ttcccagtgg |
| 16921 | aatgtgatca gaaagtcagg tggtcaggcc gatgtttctc acacagagaa ccacttccac |
| 16981 | aagattaatt tccatactcc ttccaccact tgtttgaacc ttcagcttta tcctattaaa |
| 17041 | ttcaaaacaa tcttttaact ctaggcaaca atttatattt ccatggcttc ttataacctt |
| 17101 | ttagtaaaac acacacacac agacattttt ccaaacacac cttgcatgta aaaatatttt |
| 17161 | tagtagtatc aattacatgt tataatgatg actcttagca atcttacttt taatgtaaaa |
| 17221 | gctggtaagt tatgttaatt atgtactagg tgctgataag gtcttactat tccagcatag |
| 17281 | ctaggggtgt ggccaactcc acatgtcccc aggccttacc tagctgtaaa gcaggcaagt |
| 17341 | caaacaattt tcaaaagcca aagaagcagt ttatgacctt aaggcactta gcaaacctaa |
| 17401 | tatttgaaca taatttagat gacatgtttg tattttgaag acatttgtga aaactttaca |
| 17461 | gaggagataa acagtgactt tcacgtctca tttagccagt ttgcacagag agaaagaggt |
| 17521 | cagagtctga ctggtaggaa attcttatcc ttttgccagt aggccaggtt tctgggtttt |
| 17581 | ctctccctga gcagccctag tgaMcctgct caactgtatg caaacaaaca cactaccatg |
| 17641 | aattaagaac atttacaaat agtttacaaa ttttggagaa attaggcaga gagagaaata |
| 17701 | tgacttaaat tctgtttaca aaagtatact caacatactt aaaatatcaa taagcctaaa |
| 17761 | ctccaaaaag ttagtttaag gttaaaaagc tgatgtgttc cattaactcc tgtgggtctg |
| 17821 | acaaaggtag cctaggaatt ccagataaat ggaacaaatg atgacttgct agaaatgcac |
| 17881 | aggaaacaaa ataactatcc acaaaaccaa ataaaagcct tctagaagca aaaataaata |
| 17941 | aacaggaaag caaccctaat tttttcttac tcaatttacc ctggaggcta aagtgttgcc |
| 18001 | cagggcccca aaagagccac ataataaata ttttattcct gatacacaat tcaatatcct |
| 18061 | taagttcacc aatatcatca tacatcctgt gcaatcaaga agttcacttt aggcccatga |
| 18121 | ccaataagca ctccagtgcc agcactatcc atgcaaaaca gtaaacatag tgtgaagcag |
| 18181 | tgcaagcata tctgggaaat ttggctccac actaaatcca gcttcaagct taactatata |
| 18241 | aaaaaaagaa ttgccaaact gccaatgcat ttctttacaa tagttattat tttactttaa |
| 18301 | tcaagactaa gagctttaac tacgaaaatg ttaactagcc caatgtctcc aattctttat |
| 18361 | catgttttaa agaatatttt attatctaaa ctttttccac atccttctcc cctaatcact |
| 18421 | ggttctttac tacattgttt cacaaataat tttttcaaat gtgtaatttg aactaactbt |
| 18481 | tagataactt cttaattaga caaaattatt ctttttctca gtaataacac aaactttttg |
| 18541 | gcacattttg tatacagaac tctgtgttaa ctagaagtat tatccttagt aacctaaaat |
| 18601 | tttagtgaaa ccctaaaaag aaatactgaa ctatcagata tgggcattta tagataagaa |
| 18661 | caattccaca atttttagaa acatatttcc ccatatcaca acccttcctt aattggaaat |
| 18721 | gacccaaata ttcaatgagc atcaaaatta attttaagct tttaatttac acaaaaagtt |
| 18781 | tacctaaaac atttatccca tttactgtac tcaattcttt catttttaac agtttatcta |
| 18841 | gattacttct gtaaactgag atattagaca ctatcactta aagttagtta tttccttgct |
| 18901 | aaccatgttt ctaatagcca gtgaatatca agtgctcacc taaacctgag agtctcagaa |
| 18961 | ttaaatatat aagtattttg ccaataactc agaagacgta gctaacatta aattgctctt |
| 19021 | atttgtcaaa aaaaaaaggc acattttgtt ttggctgggt ttgtagtttt ataacattct |
| 19081 | atgccaaaca ttgacatctc aaaatattta gcaaacacaa acataaaatc cagacaaaat |
| 19141 | gtatgctgac aattctgaag gcatttctat ttttattcta ccaataattt taaagccagc |
| 19201 | ttgtttagta aagttatact taagtcactt taacttaaaa atcgcttagg cttattaatt |
| 19261 | tatgagcgct cttttactta taagccaatt tggcaaacat aacatataag tgtacataca |
| 19321 | aataaacaca tctagacatg tatacacaca cacaaatgaa gatctaatag cttgaaaccc |
| 19381 | tagccatgag atagcaacac aagcttaccg gttttacttt gtttgcccca gtaggtaatg |
| 19441 | caatgaaggc tgtgaaccaa aattttgggt aaagcaattt ccatggcagt ttgatttttt |
| 19501 | ttgtttcttt ttcttttttt tttttttctt tgagatggag tcttgctctg tagcccaggc |
| 19561 | tagagtgcag tggtgcaatc tcggctcact gaaacctctg cttcccaggt cctggttcaa |
| 19621 | gcaattctcc tgcctcagcc tcctaagtag ctgggattac aggcacgtgc caccatgtcc |
| 19681 | agctaatttt tgtattttta gtagagatgg ggtttcacct tgttggcctt gttcatgtct |
| 19741 | tgaactcctg acctcgtgat cYgcccgcct cggcctccca aagtgcaggg attacaggcg |
| 19801 | tgagccaccg tgcccagatg gcagtttgat tttttttgtt tttgtttttg agacagagtc |
| 19861 | tcactctgtt gcccaggctg gagtgcagtg gcgtgatctc agctcccact gcagtctccg |
| 19921 | cctcccgggt ctaagtgatt ctcctgactc agcctcctga gtagctggga ctataggcac |
| 19981 | gcaccaccac gcctggctaa ttttttgtat ttttagtaga gatggagttt agtagagatg |
| 20041 | gggtttcacc acgttggcca ggatggtctt gatttcctga cctagtgatc cacctgcctc |
| 20101 | ggcctcccaa agtgctggga ttacaggcat gagccactgc acctggccct agcagtttga |
| 20161 | tttttaaagg tgaaacctcc ccagactcca aagaacacta agaccaaaca gtaccaaagg |
| 20221 | agaacatcac tctttcacca ggccctctgc ttagaatagc agcaccaaag cctggatata |
| 20281 | tgcaatggca atgccatccc agttttccat tcaacagtaa actccgcatt ccaaacaata |
| 20341 | ttggggccaa atagcattgc aactgcgaga taaaattcta aggagagttt aatactagac |
| 20401 | ctcagaacct ctgccaaggg catcctcttt ggagaggttg aggtccggag gattcccctc |
| 20461 | tggggcttcc cctagtgggg cccaatctta agagtgtcag acgtctctga ccttaggtgg |
| 20521 | gcaccagtcc tgcttgcatg ttttccctct aaagggaatg gcctactatg agctttcatt |
| 20581 | ttgtccctgg atgaaggcct tgacttttag catccttata atttgataag gccacacttt |
| 20641 | cccatgtttc ccattccatg aacttaataa ctggaggctg gatgtgtttc ttttgctctt |
| 20701 | agccagttga ctagggaaac ggaagaatta cgcataagaa aaggtttaag ttgcctgaaa |
| 20761 | caggcgagtt tgctctgagc tgtgccacac atagggatca gggaccacac ccagaaaaga |
| 20821 | tttaaaaaag agtccttctc ccttctgggc agggcaatta tccccattca ctccatggtc |
| 20881 | ttcaggcaat attggggatt gatcccagcc aatttccctc aatttccaaa gagctactag |
| 20941 | gaaacagctg ctaaaagacc aataaagaag aaaaggaaaa aaaaaaagaa aaagacccag |
| 21001 | gtcccttagg caaaccaggt ggtggcggtt aggcttcttc acatgaaaac cccttagtat |
| 21061 | tcaccagcca tggccagaaa cctgcagttt acctccatgt ttacacgctg ctcaccaagg |
| 21121 | gtcccgagtg ggaaaggaaa agagagagag agatttccct gtatgtaaaa agggaaagga |
| 21181 | gaaaaataaa tcccaaactt tgggcttacc ttctcctggc tggctcacca aaatatgtta |
| 21241 | ccagtggagg gtgtccaggt gcttggcatt ttgaacaaag aattggacaa aatgcacaaa |
| 21301 | caaagcaagg aaagaatgaa gtaacaaaag cagagattta ttgagtacac tccacagtgg |
| 21361 | gagcaggccc aagcagccac tcaagggccg ggatacagga tcttcttggg tccaaatacc |
| 21421 | cgctggaggt ttcccattgg ccacttggtg ttcacgccat gtaaataaag tggtggcccc |
| 21481 | caatcagtct gattgtttgc agacggaaac caatcagagg ctgaagtgaa gttacaaagt |
| 21541 | tacactctta ggcaaacgcc tggttgccaa aagcaaccaa tcagaggtat tttctttttc |
| 21601 | tttttctttt tttttctttt tgagacggag tctttctctg tcacccaggc tggcgtgcag |
| 21661 | tggcccgatc tcggctcact gcaagctcca cgtcccgggt tcacgccatt ctcctgcctc |
| 21721 | agcctcccga gtagctggga gtacaggtgc ccgccaccac gcccggctat ttttttgtat |
| 21781 | ttttagtaga gacagggttt caccatgttg gccaggatgg tctcgatctc ttgacctcgt |
| 21841 | gatccaccct cctcagcctc ccaaagtgct gggattacag gcgtgagcca ctgcgcctgg |
| 21901 | cccagaggta ctttcaatta accatctgcc atgcagaaaa ggtgggagtt tgcaaagaga |
| 21961 | gtagcctctg gtccttttgt tacttaggca tggaaagtta gggttttcct ttcaatgtag |
| 22021 | ttctacgaag tcagcgtgaa atggccttag gtttcctatt ctcctgcctc actggtatcc |
| 22081 | aagggactct gccattaggc tagctgtgga gggatggaga gagagctgag gcctcaaatg |
| 22141 | ccagtattcc ttccttccag atttgcgtgt aagaccagat aatcttccag accaaacagt |
| 22201 | atctgttgat gagtattagg ctcgaatgag aaggagagag aagtggagca ctggattgaa |
| 22261 | gagaaagcaa aaaaccttcc tagatcaaca aggaaatagc ctcttctaga atccagatag |
| 22321 | ggccctggac tcctgtggga taatgtagtg ggtgaaaaaa ttggtaRtga agtcctcgga |
| 22381 | tatggggatg cacttggaag tcttgggaac aaggaagaga gacatcctgt ggtggtgatt |
| 22441 | tttagatcca acacccaggg gcttgggtgc ctttgggggg attagtagaa gagatcgaca |
| 22501 | cattgaggga ggttcaggat aactgtctga aaatgagaga tttttattgc ttatactgat |
| 22561 | gtcccaatag ggtctgtatg tgcttcaaat aggtagaaaa gaatgaagtc cgagcctgaa |
| 22621 | gataacaata tcagtcagaa ttttaggatt gtgaatacct gtccacagaa atagctgggc |
| 22681 | cctgagcctc tgctgatgat gtaggaatRg aggcagttaa taagctttaa agtcataggg |
| 22741 | tctcagggct agggtatggt gaggacactt tgccacccct aaggttcaaa gcctcttgga |
| 22801 | ctggaggagg ttgttaacag atattctagg cagaaaagct gtgtcaggtt gtggtgtatg |
| 22861 | aagagggaga atttgacacc aaatggtcag ctggccatct gctcacctgt tcccctgtgc |
| 22921 | tccctactcc cacagggtct gcttacagaa caaggcacag caaggaggca agacacaagc |
| 22981 | aagaaatgtg cttgatgtta cccactgcag tccttcttcc actctggagg attctgaaga |
| 23041 | ctcagaagag ggacaggcaa tggattcagt ctaaacccca ggaccaggac actgcctcag |
| 23101 | cttcgaagcc tggatgcaat gctccagggt ataaccactg cccagaagca cagctagtac |
| 23161 | aagctgcagc ctcaatccag gcaaggagcc aactccaaca ggtcaggctc caagggatga |
| 23221 | agactgaaaa catgaatgtg ttgtgccact aactctagcg tttgcttttc cttgtgtttt |
| 23281 | tgcatgcatt gtagaccttg gcatcagcat ttggctagct ttaagacaga aactgagaag |
| 23341 | ccttttgtgt tttatgcgtc aacttgactg ggtcacagca tgcccaaata tttggttaaa |
| 23401 | cacgatttct aggtgcatct gtgaggattt tctggacgag actaatattt gaatttgaat |
| 23461 | cagtggacta agtaaggcag actgccctcc ccagtgtggg tggccctcat ccttctctct |
| 23521 | gcctgacact cttctagctg gaacatttgt cttctcctac cctcggactc agactatgac |
| 23581 | tggaattgat atcattgact ctcctagttc ttcagactca gattgctctc Scgggacttc |
| 23641 | tcagcttcca aatcacatga accaattcat tataggaaat tttttWatat atcctattaa |
| 23701 | ttctgtttct ctggagaacc ctgattaata cagatttatt ttcctacact ccagtaactc |
| 23761 | tccactactc cctccctcaa cccctggtaa ctatcctact ttctgtctct ataaatttga |
| 23821 | ctattctcag tacctcatat aagaggaatc atgcagtatt tgtccttttg tgactggctt |
| 23881 | atttcattag cataatgttt tcaaggttta ttcatgttgt agcatgtatc caaatttaat |
| 23941 | tcctttttga ggctgaatga tactccattg tatgtatata ccatattttg ttcattcatc |
| 24001 | cattgataaa catgttgttc ccacatcttg gctattagga ataatgttgc tgtgaacatg |
| 24061 | agtgtacaaa tatctgagtc cttgcctttt tttttttttt ttggacacag agtctctctc |
| 24121 | tgttgcccag actggagtaa agtggtgtga ttctcggctc acggcaacct ctgcctcctg |
| 24181 | ggttcaagtg attctcgtgc ctcagcctcc ccagtagctg ggattacagg cgtgtgccac |
| 24241 | catgcctggc taattttttg tatttttaat agagatggga ttcgtcatgt tgcctaggct |
| 24301 | ggtctcaaac tcctgagctc aggcaatttg cccacctcgg cctcctaagg tgctaggatt |
| 24361 | acaggcgtga gccaccatgc ctggatcatt gcttttcatt attttgggta tatacctaga |
| 24421 | agtgggattg ctggatcata tggtcattct gattttttga ggaaccatca tactgttctc |
| 24481 | cacagtgtct gatgacctac agttttgagc ttagcctttc taaaatagtg gggaaaaaaa |
| 24541 | tgaaaagaaa acaactagaa gtggaagtaa tttgtccttc attaagccag atatacacat |
| 24601 | cctgattcaa gcttgaaaac aatatcacct ccttcgctga tatgtaagta cctttttata |
| 24661 | atttaaattt taagttatga ttaattagaa acttaaaatg tatagtctgt atatgcactg |
| 24721 | gatgtccaca aagtgaccct tggttgctaa atctttgaga aaggctgagt agacactgaa |
| 24781 | cgaatgtata tccaacttac ttgtcaactc ctccaagaac attccttacc ccctgaccca |
| 24841 | agacatgctt tctatgagct ccaacagtgc ccctagtctt caacagctac cacatctgtg |
| 24901 | ctcgtcacac tcttgtcctt ctcctagtct caactgtgag ccatggatgg cagaggccgg |
| 24961 | tttttaccct tcaggtctcc agttaggcct gtgatggttc tagggttttg tttaggctgc |
| 25021 | gagtctgatt ggggctagga caaagggtca aattcaggat gaaaatcagc ctggccaaga |
| 25081 | gcagtggata catagccccc atcatcccac ttctcagatg ctcctagaac tccagcccgg |
| 25141 | gatcctttat cctctgtata ctccaccttc tccccataca agaccctctg cagagagcag |
| 25201 | gcacaaggag cagataaatg atggtcgatg ctgcctgtca attcagatgg gcctggcata |
| 25261 | acggttaact aatgggtttc ttgtttgatt gataggttct ctcaaaacta aaggagttaa |
| 25321 | atttctttaa tagcaataca tgctcattgt taaaaactca tatcaactga atttcccttg |
| 25381 | aacactatta acatttagtg tattatcctt tcacatttgt atagatattt agaaaaatgg |
| 25441 | agtgtagtat atacgtttat atatttttgc ttagcagtac atcatagaca tctatttcat |
| 25501 | tatattcaaa tggctcaata atattcccct gtgtagctgt accataatct agccaaactc |
| 25561 | ctatgtgggg gcctggtttg tatttgattt ttcagtaaYa taaacaatgc tgagataaac |
| 25621 | ctctatcagc tagattattt ctattgactg attttaatac atgattggaa ttttaaccac |
| 25681 | aagggggaag caggcaacca tgggaagaca ggctaagatt taggataaag aaaaagaggc |
| 25741 | tgggtgcagt ggctcatgcc tgtaatccca gcgctttggg agggtgaggc aggaggacag |
| 25801 | ctcaagccta ggagtttgag gttacacaaa gctataatca cactactgca ctccagcctg |
| 25861 | ggtgacagag caaaaccctc tctctcaaaa aaaaaaaaaa aaaaaaaaaa cgatttagaa |
| 25921 | agttatctca catacataag cttaccccaa ccttgtgagc aggtagtagc attagtatta |
| 25981 | gcctcatttt ttggaggcaa agctgatgat ttcattatca ggcgctcttc tgtatttcca |
| 26041 | aataaattga cagcagtaca acattctgcc tacattcagt tcaagtccag gtgctgtgct |
| 26101 | ggggacacta tgaggcatgc agaaataaag aagacaatcc ctgcccctca gggggtcatt |
| 26161 | atcaggtgtg aggacagaca cacctaaata accaagtgcc cactgtaaca gacaggagag |
| 26221 | cccaggaagg taggaaattc acttcgatag tgaggctggg cacagtttta tggaaggggt |
| 26281 | atgctgacaa taagaggtaa ggtgtattta gcctttactc tgtgcatggc actgtgctaa |
| 26341 | gtgctttacc tgcataatct cattaaaact tccccacagg ccaggcaccg tggtttatgc |
| 26401 | ctgtaatccc agcactttgg gaggccaaaa caagaggatt gcttaagccc aggagtttgc |
| 26461 | aaccagcctg ggcaacatag cagggccctg tctcttaaaa acaaaccaac caaccaacaa |
| 26521 | acaaaccaac aaacaaatcc ccatagacct ggaaggtatc ctaccctttt ttacagagaa |
| 26581 | gaaaactgat ggtcagagag gttaagaaac cagctaccgt ggcacaacac tggaacgcgc |
| 26641 | gtccttaatg tgaattcagg aggccctaca agggttggta gactttcaac aggcagggct |
| 26701 | gggagagaga cttctaagag aggaaacaca gaaacgaagc cttagaggca agaaatacag |
| 26761 | gcacgtctgg gaatggcaag gggatcagcg tgcctggggt gtgaaaaagg aggaatctga |
| 26821 | agagatcaaa actagagaaa gaaaactgag tcagagtggt gaagactgtg agtagcaagg |
| 26881 | caaggagatc ccgctgtatt ttgtattcag gtgaaaccaa ctgaagataa tgacatcatg |
| 26941 | tgtgctttat gaggattaat ttggtgcatt gcMtaagaga acaaggagac tagttagggg |
| 27001 | cttgttaaaa tagtcctggc caaagataac tagcgaagga atgagaacca gaagacatta |
| 27061 | cagagataaa atccacaaga tcttattaga tgctggggaa agaggaaaga attgtgatta |
| 27121 | agattttcat gtttgggcaa ccaggagaat gtgagtgtgt acaccaggag aggggctgga |
| 27181 | cagaagggag aggcgagttc acttttcttt tatgagctgg aaggaccaca gggacctttg |
| 27241 | agtggagatg tttagaggag agttagaaac aggaagctgg tgatttagac atagtacctg |
| 27301 | agaatcagaa gaaacccagg gccgggtgtg gtgtctcacg cctgtaatcc tagcactttg |
| 27361 | ggaggccaag atgggagggc tgcttgaggc caggagttca agaccagcct ggtcaacata |
| 27421 | gtaagaccct ctctatatag aataaaataa aatttaaaaa aagaagaagg ctgggtgcag |
| 27481 | tggctcacac ctgtaatccc agcactttag gaggccgagg cggtggatca cctgaggtca |
| 27541 | ggagttcaag accagcctga tcaacgtggt gaaaccccgt ctctactaaa aatacaaaaa |
| 27601 | ttagctgggt gtagtggcag gtgtctgtaa tcccacctac tcaggaggct gaggcaggag |
| 27661 | aatcacttga acccaagaga cagtgagcca agattgcgcc attgcattcc aacctgggtg |
| 27721 | acagaacgag actctgtctc aaaaaaataa aaaataaata aaaagaagaa gaaatgacca |
| 27781 | agggagctgg ccagggaaaa acctacactt aagattcagc aaggcatgtt agaccctgat |
| 27841 | aacctgcaat tccacagcca ggtttctatc ccagagaaac aaaatcacac gtgcacaaga |
| 27901 | gagcgtatga aagttcacag cagcattgtc tgtcttggtg aaagcctggg tcagggagga |
| 27961 | gcaggcaaat aaaccattaa acatccacat tgtgcaatag ttaccaatta agtagatcaa |
| 28021 | aggtattgac atggacagat cttcagaaca tacagtggat gagaaaaaca acatgtagtg |
| 28081 | caataataat gtataaaaca ttacttatga aaaaagaaga aaagccaaac aatcctgtca |
| 28141 | catatatatt ttaaatgatg tatgtgtagg catagagaaa attctggaaa gctaaatcca |
| 28201 | tgctaattgt gataaagggg aggagttggg acaaacatga agagcagaag gggttaaatg |
| 28261 | gggttttagc atagttgtca ggttttaatt ttataagaaa aatgtaatca tctgttactt |
| 28321 | atgtgaataa aaattctcaa aatattttta aaaagaaaga ttcaatggga agaggaagca |
| 28381 | atggaataga caggaataca ttcctagact ctaggtagga cactgttact gggaacactg |
| 28441 | ggagaagttt ctggaaKgca aggtggaaaa aggatccact gcactcagca acgctgcaga |
| 28501 | gacagcagcc agcaggatga gtcctgtgag ctcagctggt tgtcaacacc tttcacttac |
| 28561 | agccactagc tcctgtgtcc ttgaaaagtc gccatgtccc accactgccc ttgaatgaga |
| 28621 | tggagacttt ctgttctttt ttgagttgta aacatccaaa agcatttcRt caatttcttg |
| 28681 | tatttagaca ttcccttcct ttcccagaaa ttccacagtg atattctcag tgttctcttt |
| 28741 | ccagtccttc aagctgtgta tgaaatctac ttcttcccag tccagctcca gcaaatacct |
| 28801 | gcctcctctc ttgttctcca ttcaaaaaac ttccaatttg aggtcatttt taagagcatt |
| 28861 | actgtggtgg tggcggtggt ggagtttata gaatttctca tgggacccac agcatggatg |
| 28921 | tggctaacac tgactgagca cacaaaggtg caggcactgt gctaacttca taggaagtat |
| 28981 | ctcggttaat cctttcagca accccagtag gtcagtacta ttataacctc caaggtcttt |
| 29041 | ctttcacagc tgggacttag tgtggctgag cgacctaagg aggtaagtgg cagtaagctt |
| 29101 | gtggtgggtg actctgtgtt tgtctcacta tgtgagtttg tcctaagtga tcaatagggg |
| 29161 | tggggactgg actagaaaca aggtctcagg tatgcagggg tgttcagttt accaaatgcc |
| 29221 | tttatgacca ttaattcatt tgatgtcacc acagtgcttt aatgacatgg gtcattaggg |
| 29281 | aaaataatga gatgagtcaa gctttgtaat tcccttaaag tggtcaagtc tgggttaagg |
| 29341 | gcttttaggg cacattaact cactatgtcg tcttgagcaa ctctgcaagg ggtgggagca |
| 29401 | gagggggccc cctttggccc agctctctac aaatcatcta gttcctagca gccactcctc |
| 29461 | ctggtctgca aattcttggc gaggcaccct cctgctctcc aaacccaccc attccaggcg |
| 29521 | atcccttaag tggcagagga gccaggttcc tggggttaat aagcaggctg tttatagcca |
| 29581 | gcagcagtca cgggacagcc agctggaagg tcatgcccct tctgaatgtt gaggtttctc |
| 29641 | ataaacattt ccccagtgag ccttctggga gatgaggatg actctgggcc cattgccctt |
| 29701 | gctggggcag agcgccaagg ccccatactc actttcttct cctttctccc gaatctggct |
| 29761 | ctcttcctct ttcctccttc ctctcctact ctgctgtcat tccttccctt tcttcagtgg |
| 29821 | aaagaggaca cgtttcacag tagacacaca ggataactca accttctgag cctcagtttc |
| 29881 | ctcctgcgta aatggggtaa taatgggRcc ttcatctcag gatgtaaggg aaagtgctta |
| 29941 | gcactgtgtt aggcacgcac agtggacatt taaaacatat tggtcatgtc tttccccctc |
| 30001 | caccctatcc ttttgcccta atcctggcca ctgccctgtt ttctttctat tttcctgctc |
| 30061 | cagccctgct cccatttcca ccctgggcac ttccacccca ctgaYtgtgc tgctgctgcc |
| 30121 | tgggagggta gacgaagaag ccaggcttca ttcagaggag ggctgaccac cgcagggccc |
| 30181 | gcctggcctt ggcacttccc catgagaccg caccctaggc ctctctgctt ttagtaaata |
| 30241 | gcccatggga acagggggtg gagggaggat gtagaatggg agaggccaag acattttaac |
| 30301 | ctttggcttc tatttgccct taatctggct cttccaatgg cttaatgatc agagatcatt |
| 30361 | gtgtaaattg ctgtgtgact ttgggcaagt ccccttcact ctctgagctt cagtgaagtg |
| 30421 | tgggaaggaa gtgaagagca gaagttgggt agaagtgcag gtcctggaac cagaccatct |
| 30481 | ccaccacttg ctagcttgga gtacataact cctctgtgcc tcagettcct caactataaa |
| 30541 | atgcaattta tagtatacct aatttataaa agcactttta aaagtgctta gaatagcgcc |
| 30601 | tagcccatag ttggtactaa attaatctca gctattatat gcaaatggag aggtagaaca |
| 30661 | ggggtatgtg tgcatgagag gagagctgga ccttctctga gggtattcta Ragtcctgaa |
| 30721 | aacccacatt cctccttttt ggataagaag aagacagaac cttgaacaca aagtacttct |
| 30781 | cccaaggaga ccataggaaa cttgtcaaag acttttaaag ccagatggac cccttagagg |
| 30841 | tcatctggtc Yaacttgtca tgctacagta agaacagggt ggaccagaga gattcggact |
| 30901 | tatctgggac cacagagctt ttgacgagtt atagaattgc aggtggtgca ttgcagggaa |
| 30961 | gggaggcact ttaagaggac agtgggatgg gctgccagag ggctggtggg atgctagagg |
| 31021 | tcagattccc aggctccatg acctccagga ttcttagttc aggcacttac cccataacta |
| 31081 | aagcactgat gtcaccaccg gcatctttaa taattataac catgtaatga ggagggacta |
| 31141 | tatcccaagc actgcaccag acgctttcac atgcattact tactccatac aaaatcccct |
| 31201 | tgRcaaatga ggaaacacgc cttgcccaag ctgcaacaat tacaaagggg cagagctggg |
| 31261 | ctttgaatcc cggtctctct gatgccaaaa ccagggttct catgcaacac tcttttcatg |
| 31321 | tttcccagag cctagtttga ggcttgagcc tcaataaata aggatcttgt atttgtctca |
| 31381 | ctgggctggc caagcagatc ttgtatttgt ctgactgggc tggccaagcg ataacactaa |
| 31441 | tgaatMagcc tgggtcccag tcacctttcc agccctttcc accctgaccc acaagccatg |
| 31501 | atgagagacc agaccctgtg taggaaatct ttcttccagg ggccctgcct ctgtgttatc |
| 31561 | tgeccccact gtcaatggga gaagcagtgg ctgctttcgg aacaggcagg ggaggagggc |
| 31621 | ttagagcctg gggtgacRct tctggctgct gggcctgacc tccccagact ttagccaggg |
| 31681 | ccctgacttg aatgggagga gcatgaacaa acagaaagtt gtaggagaag caagaaacca |
| 31741 | ggtaaggtga aaaaaacttt tcccctccaa aaatacgaag tttatagttg atgtgaattt |
| 31801 | gtcaacttaa tatagtgtaa gaagcataag gtttaatacg gtcttcctcg ccatgatggc |
| 31861 | aggaagcaca tctgttgtat tcactaccac atgcttagtg ccccacccaa ggcctgtcta |
| 31921 | gagtcagtgc tcaataaata aacatggaaa atgaatgaaa aaaaaaaatg gagggacata |
| 31981 | aggaagagca ctgaaacatc agtcagaaaa cctgcattac agtttttagc ttcatggctc |
| 32041 | acagcaaccc ttggacaagt cacttcggct ctgtaaacct cagtttctac aagtgtaaaa |
| 32101 | tagatatcat ggcagttcct actgcacagg gctttgaaat cacagacttc cgtaggagtc |
| 32161 | atggttccat aaccaactaa tgtcaagttg aaaattgtat ttcttcagag tgaggccggc |
| 32221 | tttagcaatc tatgcaaggg gtcttgctga accagggcca gaggaaggcc agaggtgtgg |
| 32281 | ttctaagaat gaggattaaa catgagagag actataaatc tgcttggaga accgcagcat |
| 32341 | taggagggta cagcggacct ggcaggcatg acagatactc tctgccctgg agagtctcca |
| 32401 | gccctgccca tgcaaggtgt cagttagtat cagcgggagc acagatgggc ttaaatcaga |
| 32461 | agatgttaca gattatctag tccacactgg acaatagccc agtgaggggt taaaggctga |
| 32521 | gagacaaaga cccagatatt ctaattccca gctcaatgct actcttccca caccaccatc |
| 32581 | aaaggagggg gacggtggtg agagggggta tttgaagaga aacagattgg acaaaggaat |
| 32641 | gaatgcctcc atgtagcaac agcttcaaag gggcttcaga ataggagata tcttgttaaa |
| 32701 | gaaggaggaa cgagaggggg aaatggttaa aaataacgtc ttacatccat gtggattatg |
| 32761 | tttccaacta tatcatgtgt agttattgca tgtaaggtac tatggtggag agttactgat |
| 32821 | ggggcatcag aaagcccatt tcattaccca gctctgccat gtacaagctc tgcgacctcg |
| 32881 | ggcaaatcct ctctctgatc ctcaaatttt catgtgaagc atgaagcaat agtgcctacc |
| 32941 | ccatagacct atcctgggga ccaggttagg aaagggaagt ggagggaggt tgtatcctct |
| 33001 | ctaaaatgct ctgcaaatgg gcaacatggc aaagcggtca caagcaagcg tgtgaggtag |
| 33061 | accRtcactt agcctttctt ttcttttttt tttttaagac agagtttcgc tcttgttgcc |
| 33121 | caggctagag tgcaatggca cgatctcggc tcactgcaac ctccacctcc taggttcaag |
| 33181 | tgattttcct gcctcagcct cctgagtagc tgggattaca ggcgcacgcc accacacccg |
| 33241 | actaattttt gtatttttag tagagatggg gtttcaccat gttggccagg ctggtctcga |
| 33301 | actcctgaca tcaggtgatc cgcctgcctt ggccttccaa agtgctggga ttacaggcgt |
| 33361 | gagccaccac gcccagcccc acttagcctt tctacgactt tgtatcctca tctgtaaaat |
| 33421 | ggatgtggtg ggaatcaaat ataatgcatt tgcagccttt ggcacagtcc ctgacacata |
| 33481 | caaagcctgc aacatcctgt tagttactac cactagttgg gtttaaagaa ttttctcatg |
| 33541 | taatcctcac aataatccta tgaggtagga ttattattat tctcatattg cagatgggga |
| 33601 | aaccaagacc taaaaagaat tgcttaccca aatcaatagc taattagtag acagcaaagc |
| 33661 | caactagaac ccagatgccc tatcagatca ggcaggcaaa gatcagaatt agtgagtagg |
| 33721 | gcaggcagca gcgggaatgt ctgtggagtc cagacaataa tgcagccaca aagccagagt |
| 33781 | tctggtagct gcagaggcat ttccaacttt aaactctggt cagtctggag ctcagtcaga |
| 33841 | acaaaccttg tttcatcttt gatttaagga gctgagaaaa ataagctctg gaaagagaag |
| 33901 | aggggaccct gtgttccagc atcatctgcg ttatttattc actaggctga ttgcttcKcc |
| 33961 | tctctgggcc tcagtttccc cagctgtata tgaaaggttg aactagatta atgcttctca |
| 34021 | aacttgaatg aggttctgag tcacctgatg atcttgtttg aatgtagatt ctgattctca |
| 34081 | gtaggtctgg gaaaaagcct gagattctga atgtctgacg agctcccagg ccatgccagt |
| 34141 | gctgcagagc taaggatcac tctctgagga gcaaggaact agatcagctt gaaggacatt |
| 34201 | tctggtatga taatgcctat gagagcaata caccaaagac tgagaagtcg agcaaaaaca |
| 34261 | aattctgccc aaagtgcctt acagtatttg ggggtccagt gtgagggcca ggctatttcc |
| 34321 | catggaccac agaccccttt aaaaaggggc ttgatatcca gcactcagtg aggcattcag |
| 34381 | ctgcagggcc agctctccag actcttcttc ccagcccatc tcccaccctc acctgcactt |
| 34441 | cacctcctaa agggaagaga caaaattttc taagccattt ccctccccta tcagggctgg |
| 34501 | ggagggagcg gcttgttcct aatgaagaca aaggacaagg cttaagggac acttgagaat |
| 34561 | ctttttctgt ccttcctttt cctcattcat tcattcattc ttcattattc aactatttat |
| 34621 | tgagtactct ctacgtgcct ggtattctcc taggggctga ggttacagca gagaaaataa |
| 34681 | gacagatgtg gcctctgacc tcatgttgct tacattctaa ttgggaggaa aatgggacag |
| 34741 | gccataaata ggtagatttt aaaaatgaat gagatcatct aaaatcacaa aaagcaataa |
| 34801 | aagaataatg aaacaaagtg atggggtagg gggcttcttc tgtctattgt cctcaagaca |
| 34861 | aagtccaagg ttggaaaagc tcatctccac ctgcccttgt ttgcttctcc agcctcatct |
| 34921 | cctgtcactt tttgccttga actttccatt ccagccacac aggacatgga gtatcaaggc |
| 34981 | tggaagacgc caaccagcct ttgatccagt ggttctctca gccccaatca ctctttctct |
| 35041 | ttgtccctac ctcttcctct ttttccctct ttctcaccca actaacccct cctgctcttt |
| 35101 | cccagcttac tcgccactcc cactggaagc tggccctgct gccactgatc tgggctagga |
| 35161 | atccgtctgc gccaccttcc cWgatgacag catccatcac ctgtgcagcc gtgttaattg |
| 35221 | gctgtccttc ccccaccaga ctgtaagtgc ctcaagggca ggagtcctgt cttattcact |
| 35281 | ctgaatcctg aatcctcagc agttgctgca atgcaaagca cagagtaggt gcttaaggaa |
| 35341 | cacctgttga attaactgac actaagttta gtatatttaa gagctcagta atgggctggg |
| 35401 | cgcagtggct cacgcctgta atcccagcac tttgggaggc caaggtgggc agatcacctg |
| 35461 | aggtcaggag ttcaagacca gcctggctaa catggtgaaa gcccgtctct attaaaaata |
| 35521 | caaaaaatta gctgggtgtg gtggcaggtg cctgtaattc cagctactcg ggaggctgag |
| 35581 | gcaggagaaa cgcttgaacc caggaggcgg aggttgcagt gagctgagat agcaccactg |
| 35641 | cactccagcc tgggcgacaa gagcaaaact ctgtctcaaa aaaaaaaaaa aaaaaaaaag |
| 35701 | ctcagtaaca tgagacaaag gcatctacaa gacatggctt tggagacaaa gaataaattg |
| 35761 | ataaattgga aggaaaagaa tataacaatt cctcagtcct ttctggagtc cacattctag |
| 35821 | tggctttcag ctctacactg tatcaggcct cctacaaggc ttaccaggca gactgggcag |
| 35881 | aaattattga cccccattca acagctgggg aaggtcatgc ctcagagagg tgaacctact |
| 35941 | tcagctgaag ttacccagcc aggtggtggc aaagcatgtc caaagaaagt tagggaccag |
| 36001 | agacgtcaga tccaacccct ccctcttgca ggggatgggg taggggtggt aatctgcaga |
| 36061 | ctctgaacta agtgttctag ctcatttcaa actcagaata accatttgag gtaaacagta |
| 36121 | gccatagcca caaaaaaagt agacacatga tttgcccatc atccaccttc cccctctaac |
| 36181 | ccaattgtcc ctgggcagac cgtgcagagt accaccccat tcgtcctcaa ggactccctg |
| 36241 | cctggggtca actcatgaga aactgtccac ccgcagattg actgggacag aaaaaaccct |
| 36301 | agacttttaa tttccttatt tcacagttgg agacaatcca aagcttcgag agaaggaact |
| 36361 | agtctatata gcacatactg agacagggtc agaactccgg agtcagaact ttctgaagta |
| 36421 | tagcccacaa gtccccttga catgaacctt ttgagttggg aaagggctaa gaatgatgtg |
| 36481 | aacatgacct ggccatttgt tagctgtggt caggctgggc gaagagaggc agcccctctg |
| 36541 | gtagttctac tctagaactc attagtcccg ccagtcctca atggtttgtg cattggtagg |
| 36601 | tagcccatgg gaagtaggat gtgggttgct tactgcttag tgactgttta tgaagattgt |
| 36661 | tattgctact acagcagtat agtctcccag ctgaacaata acctagaaag tatggagagt |
| 36721 | ggccgggcgc agtggctcac ccttgtaatc ccagcacttt gggaggccga ggcaggcgaa |
| 36781 | tcacgaagtc aggagttcga gaccagcctg gccaacatgg tgaaaccccg tctctactaa |
| 36841 | aaatacaaaa aattagctgg gcatggtggt ggtgcctata atcccagcta ctcaaagggc |
| 36901 | tgaggcagga gaatcgcttg aacctgggat gcggaggttg cggtgagctg agatcatgcc |
| 36961 | attgcattcc agcctgggag acagtgcgag acttcgtcgc aaaaaaaaaa aaaagaaaga |
| 37021 | aagtatggag agtaggtgga gaggggctag cagagacata ggtagggcac cttaccacta |
| 37081 | agaaatagag caaagggtag gtgctttatg ttccagaagc atatagatcc aagaggaggg |
| 37141 | aagggacatt ttggctgaaa gcttggaact atatctagca tagataaatg tgattctcat |
| 37201 | aggtgcttgt atttgctatg ggaccctgga ccaatcattc agtctcttga agccttagcc |
| 37261 | tctcccataa gagggtggaa tgagctagtc tctagggatt cttcttttta taactctccc |
| 37321 | tctaagtggg ctttgcaggc agagggagtc attaactcct gctatggtct gagtgttccc |
| 37381 | cctcccgcat attccgatat tgactttttt tttttaagag tctcactctg tcttccaggc |
| 37441 | tggagtgcag tggcacgatc tcagctcact gcgacctcca actccctggt tcaagcagtt |
| 37501 | ctcctgcctc agcctcctga gtagctggga ctacaggcgc acaccaccat gcctggctaa |
| 37561 | tttttgtatt tttagtagag atggggtttc accatgttgg tcaggctggt ctggaactcc |
| 37621 | tgacctcatg atccgcctgc ctcggcctac taaagtgctg ggaatacagg cgtgagccac |
| 37681 | actgcgcctg gctatattga catcttaacc cccaagtgat gctattagga ggtgggaact |
| 37741 | tgggaggtga ttaggtcata aaggtggatg gagcactcat gaatggaata aatgccctta |
| 37801 | taaaaaaggc ccaagaaagg cccctcaccc catctaccat gtgagggtac agtgagaaga |
| 37861 | cagccatgta tgaggaagca ggtcctcacc tgatcccaaa tccttgatct tggacttccc |
| 37921 | agcctgagaa ctgtaagaaa taaatctgtt atttacatgc cacccagttt atagaatttt |
| 37981 | attatagcag cccaaacgga ttaagacaac tccatttcag gtaagcccaa caaacctagt |
| 38041 | atttgccagg ccaggtcctg ttgaggctta attgagaaat gtgtagcaaa ttgttagtag |
| 38101 | tacaggcccg agaccatgat ccttagaccg ctacacttgg cctgtggtca gctcttggga |
| 38161 | acttctattt cagaaggatt tccaccattc cccaaactaa taagagtagc tcattatgcc |
| 38221 | taaactggac aaacaatgca gtttctgttg actgcctaat tttcttctgg gagtttagaa |
| 38281 | ttctggtatg tgcttagcca aggatgccta tgtgaccagc ccctaacaaa aNcctggcat |
| 38341 | tgagtctcca gtgaacttcc ctggtaaaca acattttaca catgctgtta cagttcattg |
| 38401 | acaaaggaat gaagcacatc ctgtgtgctt aattcagctg ggggatgatt ctgggaatct |
| 38461 | cgtggctgtt ttcttccaga ctttgtccca tgcacctttt ccctttgctg attttgtaac |
| 38521 | cttgtgctgt aataaatcat agtgtcagtg tacttatatg ctgagttctg tgagtcctcc |
| 38581 | tagcaaatca ctgaacctag aggtgatctg gggaccccca acaggagtta agcctagatt |
| 38641 | tcacagagtc aatcataatc ttgtgccagt cccttaagag tatacagctg aaaccagtgc |
| 38701 | tatccaacag agatataatg tgagtcacat gtaattttac attttctagt ggctatattt |
| 38761 | taaaaaccaa aaagaaacag gcaaaactaa ttttaagcac atgttttctt caacccaata |
| 38821 | tattattatt cttttatttt tattttcgag acagagtctc actctgtcac ccaggctgga |
| 38881 | gtgcagtggt acaatcacca ctcactgcag cctcaatctc ctgggctcca gtgatttgcc |
| 38941 | cagctaattt tgaaaatttt tgtagagatg tggtctcact atgttgccca ggctggtctc |
| 39001 | aaactcctgg gctcaagcca tcctcttacc tcagcctccc aaagcgctgg gattacaggc |
| 39061 | gtgagccatt atgctcagct aacccactat attaaaaata tatttaaaat atttccatat |
| 39121 | gcaattttat taaattaaga tattttatat tcttttatca cactaagtct tcagaaaaca |
| 39181 | ctgtgtgttt tatactcaca gcacagatca gtttgtacta gccctactcc aagcgtgcaa |
| 39241 | cagccacaca cgcccatggc ctgcctgcta tattggctta gaggttaatg gcaagggctc |
| 39301 | tggagacagt atatgcggag gctaaagaca ctctgtctag gatgctgatt caaccatgtt |
| 39361 | gatttctgat taactccagt tccaggaaag ccgctaaggt tttcagttta tctactcttc |
| 39421 | cttgtgtaag agcatgtcct taacataaat attcccctta ggtgaaaaca aacttaatat |
| 39481 | tctcacactt cagttggcct acacatccct tcaataggga aatcgcccct tccctatgct |
| 39541 | atataagccc tgggctgagg aggggtaata gcttggggat ccactatctc acttcacagc |
| 39601 | cacctaagac ttctgtggct tctgtttcta agtccctaat aaatgtttct ttctgagaaa |
| 39661 | ctgggtatgt cagcttcttt cttcagcttc tcagcctcct ctgactggct ggcgcggggg |
| 39721 | tggggtaggt ttacagagat ctgctcacag cagaatagta tgtgtgggtc agaatcccgg |
| 39781 | ttctgtgact taccaactgc ataaccttaa gcaaagttgc ttaacctctc tatgtattag |
| 39841 | tttcttcatt tacaaaatgg ggataataat gttggctacc tcaagaggtt gcagagatta |
| 39901 | attaatctaa ggcagcacct ggtatagata ggatattgag tgaatgctgg ctgctactct |
| 39961 | ctttatgcta aagcttggcc catggagatc aacttgtcta acacctcgtt ccataaatga |
| 40021 | gaaaactgca gcccagagtt tggaaggcac tagtttcaca agcaaaaact acagccaccc |
| 40081 | acctctcctc ttgatgaact ccctgtcttc tggctggccc tgagatcaaa tttgccaatt |
| 40141 | atttaggaaa ttggcagctc cagggcccca gctcggttct gcaatttctc tcgattgcaa |
| 40201 | aacaagggct actgtttgaa gttggcactg aagtgacgca ggctgggcct cacttctgct |
| 40261 | tccacctagg ctcatcagtt agagtggctg atcccatctt tgagttcaga acctgaaatg |
| 40321 | tttactaacc aataataagg ctggctttcg ttgttttaac tttttacaat cctttgagtt |
| 40381 | tattaatttg tgttctatct tccttgaaga cacagtgcat cagcactttt tgtaaaacct |
| 40441 | ctttttaagt catcttcggt ctctgttcac ctaccaagta ggtaagtagt gagctcccta |
| 40501 | tagaggtctc taaaaaatag gatgaagagg ttccgagtgc tcacttgtct ggaatgcgga |
| 40561 | agacgtgttc tcagactgga agcaaaacta gcttatgatt cttctacagc ttctccttcc |
| 40621 | atccctccct tcccattttg gccaatgcaa atcatctact ctcctctgac aagcctactc |
| 40681 | atcataaccc gcacgtcttg aatcttccta gaagatgaaa tcagaccagt cttgcgggct |
| 40741 | ctacatggtt acaacttgct aacttgaagc tctcattatt ctatatgcca aatattgttt |
| 40801 | tccttgacat taatttattt gatagatatg tatcaagcaa ctactatgta ttaagctctg |
| 40861 | tgctggtgct ggtgYctttt tggatcttat aatttagtgc agaaaataga caaacaagaa |
| 40921 | atgatgataa agtacaacaa agggtcgatg tacaaagtgt caaatactct aggaactaca |
| 40981 | ggaaaacaag ggaaccatca cgaaacccct gtcttaagac gtgacattag tggagatatg |
| 41041 | aaaaatgagt aggatagtac cagttaaagg gagacaacct ctgttccaag cacagggaac |
| 41101 | agcagagatg aaacctggaa gtgagggaga atggcagact gcaagaacgg aaaaatgtcc |
| 41161 | agtgtagcgg aggcagagag aatatggaga gtgtggcaaa agaggaagaa gcagatggat |
| 41221 | tttgagggca ctttctgaag tgctaaggaa tttagacttt aacctgaggg caatcagaag |
| 41281 | cagcctggtg gagaacgata tatttcaaaa catagggtcc ttgaaaacaa gtcaaccaaa |
| 41341 | tgtatttaaa aggctgctga tgaaaagatt gggaagtatt gttttcattc tcattgtttt |
| 41401 | cactgtcatg ctctttgtgc caatggttag acctcctttg aaagctcact gcagcatgaa |
| 41461 | agcccttctt aatgccaggg caggctcccc aagcctcccc accccactgt ccatgtcatc |
| 41521 | agttttgtac tcctgttttg tatggctcag gctttcctta tactcttagg aatgaaaagc |
| 41581 | cacagacacc accactgaga gactgtcaaa gatccttgtt aaaYaggtgg acaactgaga |
| 41641 | tcagagaagg aaagtaattt tattactttc Ygtagcaatc caggggtagc atctcaggtc |
| 41701 | tctggctcct tcttgtctcc cctaaagaaa tagaccacca gggctgggat taaggtgaga |
| 41761 | caagtgagac atagagggtg caaaatgtag agagatgccc gctgccaggt gccagcctgc |
| 41821 | acttRtgtga ccctaggtgc cttcccttcc ctcaccctgc tggtatctgc tggaaacacc |
| 41881 | tttgagagca gggactttgg cttttagaca actctttagc atctctcatg gtgttaacat |
| 41941 | gttgctaggt gcctattttg agggtcacta gatgcctact gatactaatg aacaatggat |
| 42001 | ttctgacaaa ctgatgtgca cacagatgtt tatattttag ggtaaatacg aaccttaaaa |
| 42061 | gacaacagaa caacatggag agggcctgag actgagtcta gagacctgga ttctggttcc |
| 42121 | ctccctgcca tcagttggtt atgggaactt ggataaattg ctcctcatct ctaggcttca |
| 42181 | gggaaatgag gtggttgaat aaaacgtatt gagcacttac tgtgtgtcag ccattgttca |
| 42241 | tatgctccca ggctttaact cagctaaaga cttcctggcc tctgtggttc cttccacttc |
| 42301 | aacaggctgt ggtttgaggt gggaagactt cgtagagaat gcaaaacttg agagacatct |
| 42361 | tccaaattcc cagggggatg ttaatacctt taatcatagt aaaggtatgg tttctcaagg |
| 42421 | catttcttgg tcagaagaaa gttccagaag gcacttaatc ctaggactca cactaccaag |
| 42481 | gctacagcca ggccaactgc ctcacaataa ccttagaaca tgtctgaaga cagattttca |
| 42541 | gcttctgccc ctagagattc taatgcagtg attccaaagt ggggtccagg aatctgtatt |
| 42601 | aaaggcttcc cagttgactc tggtggtcag agagatttga gactgattcc atcacattcc |
| 42661 | ccatctgtga acgggatcat acctagacag cccagcccta gaactgcctg gtctgatcct |
| 42721 | aagtgttcca tggagatttt gtttttttaa tgtaatgaat gattaagtca gcaaatactt |
| 42781 | tacatctctt gtgtgctagg ccctgtgcca ggtggtgatt atgggcccta ttctcaaagg |
| 42841 | actcctggtc tccgtctgtc acttacttta gaaacaagtc atctagccag agccagaagg |
| 42901 | gcactggaga tcactaatcM atcccatcat tacaYagctg aggaaactga ggcccagaga |
| 42961 | gtaactgcaa catgttaaag actacacagg gagcaaattt Wttttctgct tYtaagccag |
| 43021 | gtggtttggc cacagatagg ccaagaagaa tacgaacaga caagccttgc tgggtttccc |
| 43081 | actcagttta ttactattag accattccct ttttccccac tcacatttct gcgcatttcc |
| 43141 | atggtcttca tagaatctaa gcctaaaaat agagttttcc ttgagtcttt gggtcttcat |
| 43201 | ttYtgaagac tctcatgtca cagaaaactt taattaaata aatcgttatg cttttctctt |
| 43261 | gctaaccttt ttctacaggc atgtcagctg tgaYYcttat gatggggagg aaaggcaccc |
| 43321 | caccttctct gtccctacag tccYaatgcc ctacccagaa tggggttttc aaaatcccag |
| 43381 | gacacccact ctttgtttct taagcactaa acctatatat agtaaatgtt tctggaagtt |
| 43441 | taacttcagc tcttgctgaa attttaaacc ctcaatttcc agaggaccat cgccaggtgt |
| 43501 | ttttaaaaYc tcgataggaa taagaaatgc ttcccagaat ggagacttSc atcagttctW |
| 43561 | gggagctatt agcccccWtg ccctggctgt aatggagacc gctgtgtctg cctcctttcg |
| 43621 | cactttggag ccaaaagagR aagggaccgc ctcccacgtc cacagggacc tgacttccac |
| 43681 | ctctctgccc agatttgctt atgtcactgt cgccccggga cggggaggtg gggagctgag |
| 43741 | ggcaagtcgc gcccgcccct gaaatcccag ccgcctagcg attggctgca aSggtcYcgg |
| 43801 | cttggccgcg gattggtcac acccgagggc ttgaaaggtg gctgggagcg ccggacacct |
| 43861 | cagacggacg gtggccaggg atcaggcagc ggctcaggcg accctgagtg tgcccccacc |
| 43921 | ccgccatggc ccggctgctg caggcgtcct gcctgctttc cctSctcctg gccggcttcg |
| 43981 | tctcgcagag ccggggacaa gagaagtcga aggtgagtga gcctccgggc cgggggccgg |
| 44041 | gagaaaaaac ctagcccctc ggtgtccagc gctcagtgca atgcacccct tttcccaggc |
| 44101 | tccccgccag atgggcaatc cccaggtgcg agagacctcc tgaacccctt ttgccgcccc |
| 44161 | ctccgccgcc gggaccccgc ccccgaccgt cgtcgtctcg tagttccatc tgttggagag |
| 44221 | ccgagacctg gtgcttcagg cgggcagaat gactaaggga ggaaggtctc tctccccgag |
| 44281 | ctcgcacttt ctccccRctg ccacctcgag Rgtcgccttg ctacatctat gtcacctccg |
| 44341 | tgcctgagct gctccccttd agtagggcct aagagggagg gcgtcacaga aaaaaatgcc |
| 44401 | cagcgtctgg gtgggctgtg caagttccca gggagagaga caaggagaaa ggagagaggc |
| 44461 | agctgggtgg tcctggtcct gaagaactgc tgtggggggc tcttctaccc caagaatgat |
| 44521 | acaggcaggt agaaatggcc acttggattc agggcattgg tagaagaggc agagatctgt |
| 44581 | gctagaaRga gctctggagt gacagtgcag aacactcagg accctgagtc cttacctgct |
| 44641 | cctggacccc cgtttctcca tctgcagggg agagtttggg ggtgggagtg catggggcac |
| 44701 | aatgaagctg agggcctcag aggggatgct tggagaagct gaaaaatcca caagctgttc |
| 44761 | tctgaaattt cctcYcctgg ggcagcctca ctacccagga cccactgtcc tcattagcct |
| 44821 | gaggaaacct ggtagttgga gaaagctggg gactgctaat tcagaagaag aggtagaatt |
| 44881 | ctctagagcc tcagtctatt tccagcaggt gtgtggccca Yacctggagt ggggatactg |
| 44941 | aggccaggag tgggatgacc cagcatgctt atctcctttg acagtatgta ctggggtggg |
| 45001 | ctctgYagac ctctcctcta cccagggagt gggagtgggt ggggaaggag gcagaagcca |
| 45061 | ggtgtaggga tagactcaaa gcgagcgatt tctgtctYca acttcccaac atgcataact |
| 45121 | cacatttttg caagctctga gcttttgttt ctaaaatcct ctgggtcttc actttaatta |
| 45181 | agttSttatg agtctaggat tccgtttcca aaattctgtc cacttctcag gaagcccatt |
| 45241 | ggaagcacag ggttccttcc atgttactca ccccttttcg gtcctcagcc taaatccgat |
| 45301 | taatcagcct ctccttggag tcagtctaaa tggatgtgaa gccacttcgt ccaagtcccc |
| 45361 | tcctttttat ccatccctgt tcataatccc caactcagaa ggcattttcc aggtcaggaa |
| 45421 | tgggatcgat tttcaacatt gaggtttggg gtgggccata gacaggccag caccRtggag |
| 45481 | tcagtcccaa ccttcagttt tggaaRggtc aaagaagata caattgggcc ctgcctcaag |
| 45541 | aaSgctagtg gggagaacgt ggactccatg aataactcat catagctgtg tcttctctgc |
| 45601 | Mgcactctgg ggaaggataa atggactcag agagaatagg atggggatgg tYtagaaaag |
| 45661 | ttttagggtg aggtgtgatc atatcacata caaccagtca ggacttgctg gctaatgaaa |
| 45721 | gcctgggcat gcccatctct gctcccaagt tcttaNagtt cagatgtctt agctctgggt |
| 45781 | taggacccaa ccactcacct tacccccaac cccagggtaa agagaYaggg ttatggggca |
| 45841 | tgtggagaat ggaatggacg aaaggtgact cagccccaga gaggtgtttt cctcctacca |
| 45901 | attgaaaggg agatgctagg gaagagacca ggtcctcctc ttcttgctgc gtcacctccc |
| 45961 | cagtccaact tcaSgctgcc cacgctcctt gtctctacaa aaggactgca gaagccggaa |
| 46021 | agagtgacaa ctgctgacgt gcaYgggatc ctagtaactg ctggtttcta ggtgactaaa |
| 46081 | cctggcagag agaatcatgg aaccacaggc tgacagagtt aaagggccct taagacagcc |
| 46141 | ctgaacctga ctccatctta caatggagga gctggagccc cagcaaaggg ggtcacatgS |
| 46201 | catcagagac acagcaaRgc Ycagcactca ggtctcctga ctcccagacc acttctcaca |
| 46261 | gcatcatatt gataggagtR ataagacggg agaggagaaa gacacaagac cagcagcccc |
| 46321 | agccagccag agtcctgNct gagtcccatc atccaactct caagccattg gaaccctctt |
| 46381 | ctcttgcccg gctgtgggag gattcaggca ccctcatggc ctctcccctt atctcctctg |
| 46441 | gccactgttt cagatgcggt gctctgggat tccacgtgcc cagagaaggg aagggggctc |
| 46501 | atagaggact gagttgcagt gatcagtggt gagcacagcc gtggctctcc acccatgggc |
| 46561 | caccttctga cccccactat ccYttgacat gagatttcgt tccaagagac tccaggcctg |
| 46621 | ttttgctctg ccagcagatt cccacaaccR ttttgggcag cagcatgctt atctccctgg |
| 46681 | acatatgccc agacagtgta agtgacttgc tcagggccac Rcagccagca aaaaatagaa |
| 46741 | cctaatgaaa tagggttctc cttgccacac ccccaagctg aaactgtgcc cagaagctgg |
| 46801 | tccttctStt tacaagttcc cattattagg acaacctgta atcttttttt cctccatgtc |
| 46861 | tcagagttca tttttggatc atggcagagt taaaaaagtg gagaggctat agacatgcct |
| 46921 | ggctttctgg ccactagatc tttgtggcgg tctagggtgt atttgttgtg ccccagtttg |
| 46981 | tctgcatttt aaggcggaac tggccctggc tgggaacgag gaggtccagg agcagtagga |
| 47041 | atgttgatct taggtcttgg gcctgcctcc agcacccacc aaaagtcacc ggatgtggaa |
| 47101 | tattagactc atgtaaagca ggaagtttgc accagagcca agaagagagc ttgcagctgc |
| 47161 | cagggaatgg cctggcggag gaagcgcagc ctcgcccagc tcagcagacc tgcttcatga |
| 47221 | cagaggcagc tcttctgcac tMtactgggg ccacgccctg ccagcatata tcactccctt |
| 47281 | cacctggtca ggcccaggta ccttgcctca acagcaagtt ctccagaatt gaggggaaga |
| 47341 | gagggagtga atttgcttct ctaactccag ccacctgtct ctgccctctc ctggtctata |
| 47401 | atgctacttt gcattccatt tgtttattgt ctgcccacct ctcaaaggat atcagggcca |
| 47461 | caaaggacct taaagaccac cttatacaat ggtttcaagg tttctccttt cYcatcacga |
| 47521 | ccagcccacc tgccaaattg tgtcaatgat gcaatgacat cctttcaaga atagtctcag |
| 47581 | aattttgttg tctgtgtcaY gggcagagta ggctcatagg ccacatccta ctagccagca |
| 47641 | gtgaccccaa tcccctctct cccactgatc atgatcctat caagccatca tggttgacct |
| 47701 | ggttgRagag ttggttcagt tcaaggttct cattttataa atgaggaaac tcaggtccga |
| 47761 | agaaaagaaa gggccagtcc aagaccacac agggagttaa tggcaRaggg acatggagcc |
| 47821 | caggtctccc agcccacagt ccactgcact ctgtccctcc ttgtcctgga ggctgactgt |
| 47881 | gagcagcagc tggggaggga ggaaggcata agggtcatca ccagcctgct cagacccgga |
| 47941 | acattaacac atgcaggtac tgttgctttt ccctaccKca ccacagccct ttcccccatg |
| 48001 | cctggctctc agtcctgctt YcctRtttgg taacaacagc ttcatctttc ctgtcctgca |
| 48061 | gattgggagc ctctgaatca ccatgtccat acKgcctctt cctcctttct gttcagtttt |
| 48121 | tccttcacac tggcctagtt caggttctca tcctcaattg cctggattat tccaacagcc |
| 48181 | acccaaccag tctccatcag cccgtctagg aacccagtca tcagctttag ggcagtctcc |
| 48241 | ctgagagccc agtaaatgtt ctgaaattga catgtgatgt ggaagtaatt agcaaaataa |
| 48301 | gtcattctcc agggttccat agcactcact tattaagtgc ttaatattaa taagtgctta |
| 48361 | ttaggtgctt aatattaata agtgcttttt aagcacttaa tattaagtac ccRaaaagca |
| 48421 | cttattaagt gctttcataa tcattatctt aaacaaggaa ttaggagacg tcagtgctag |
| 48481 | tccagttcca attctcggtg attactttga gaaagtcact ctctctgttg ggatctttca |
| 48541 | ttcttttgaa aacggagatg tccaagttcc tttccagctc taactgctcc ttttatggcc |
| 48601 | tgtgttccag atggactgcc atggtggcat aagtggcacc atttacgagt acggagccct |
| 48661 | caccattgat ggggaggagt acatcccctt caagcagtat gctggcaaat acgtcctctt |
| 48721 | tgtcaacgtg gccagctact gaggcctgac gggccagtac attggtaaga gcccaccctt |
| 48781 | cctccctgct ttatttgggg ctgtatggca tatttcaatc acaggagctt ttctggtgca |
| 48841 | tgggggaaag ggtgatggca atcacgagag tccaagcccc ttttctcagc tccactgtgt |
| 48901 | tccgtggttt tgtgaagatg attatataag ccYgaggtct gattgccttt ggacatgttc |
| 48961 | taggagattc ctagttatcc ttcttcatct ctgggcacct caacaaccct aaaggcagag |
| 49021 | ggatagagat taggtttgtg cttagagctc cctttggctg gagcatgaga tggtaactga |
| 49081 | agctccatct tgctgaSaat atctYatttt ccctcagccc catctgcttt ggtgcttctc |
| 49141 | ttggcagctc tctggaaagc aggcaattgc ctcgaggccc cagagtgtat gcgtggtgta |
| 49201 | gcgggatgaa ggagcaggct acacttctaa tgcccattct aaaataaact ttgaagatga |
| 49261 | tctagtttag ccttcccctc ttctcaatct acacatggga aaccaagact cagagcgaag |
| 49321 | atacaactta aacagggtca caaagctatt agcggtggaa tggggcattt ggcgcaggtt |
| 49381 | tcatgatctc ctgatatgct tactcctttc tccctagctg gggtagaata cagaggctag |
| 49441 | gggaacaggc aaccaaaggc aagcgacagc acccagggga aaacgctttg gggctgagca |
| 49501 | gtctactggc agggggtcag ggaggcaagg gcaatttgac cctccatgct ctgcctggca |
| 49561 | atcacaggcR aattcccgga agtgaaagga Yggcggtcac gtggcccagt ggctgtgagt |
| 49621 | gctttttctg ggatgcttct ctctagcctt ggaacagagc agagtgcgtt tgggcaagag |
| 49681 | atgggctggg tgctgctgca aaaSWgacca ggggacactg aggaaactgg ggagctgggc |
| 49741 | cagggcctca tctgtgttcc tgatttgcca aagattatgg gagggttgta acctcacYcc |
| 49801 | aaagaagttc tctgccttgt atccagggat ggatagttct tgctccagaa aactcaatcc |
| 49861 | tgagggttct gaatgagtgc tctagctggc ccaggtggag ggccttggca atgggcaggt |
| 49921 | gactgacagc tgacttgagg aagggtatta ttcttgtcct ccaaacctcc aatccatcca |
| 49981 | gattagagtc aagaggatag gacctgagtc ccagcattgc tgtgaactca ctggtgatcc |
| 50041 | tgcgcaagtc cctccctttc tcgggcctca gtagttccag cRgcacagcg ggtgagccgg |
| 50101 | gggagtggtg tggatgagac agggctcctc gccaggatac tcccacRtct gctctttctc |
| 50161 | tttggcccag aactgaatgc actacaggaa gagcttgcac cattcggtct ggtcattctg |
| 50221 | ggctttccct gcaaccaatt tggaaaacag gaaccaggag agaactcaga gatccttcct |
| 50281 | accctcaagt gagtactcac tcagcatcct gagaaagctc ctctcacatg gcccacatct |
| 50341 | tgttatcaac cccaaWtcat ggtggacatt tatcggccac caagaactac tctcctcttc |
| 50401 | taggatcccc agtggaatga gggaagggaa gggacaagag agggagaagg acagggacaa |
| 50461 | ctggttgtga tgtgcatccg cagggagcac caaggttgag ggacactgaa aagggaccag |
| 50521 | gctagaaagg aagaccgtgg actcacatta tgcctatgcc cactgcacat tcactggctc |
| 50581 | ctgctgccca ctgcagaata aatccagact cccaacaccc tctcccctgt tctgtccctt |
| 50641 | cctctcattt ctgagccctg tgcccacctc cttgggaccc acctaagaac atttctcaac |
| 50701 | aggtatgtcc gaccaggtgg aggcYttgtc cctaatttcc agctctttga gaaaggggat |
| 50761 | gtcaatggag agaaagagca gaaattctac actttcctaa aggtaagtga gctgccacct |
| 50821 | gtgctggctg gggctgcagc ccctcctggc tccagcccac agcgtcaggg cccatgccac |
| 50881 | ctcccctgct cctgggctct tggggaattt cttggcacct gactattgtt ccaactagag |
| 50941 | ggctctgcag accctgacta gggtctcMtt ggcccatttt acagaaaggc ccagaaggac |
| 51001 | ccagagtgaa catactaagg gtctcacaMt cttctagagc cacagctggc gctggcagtc |
| 51061 | ttctaactcc caaactgggg ctcttYtctc agggccaggc tattccccag gaaggcctgg |
| 51121 | gaaggaagag ggtcaggggg cctcaagcaa ggttgacact cctctYatcc ctgctctaga |
| 51181 | actcctgtcc tcccacctcg gagctcctgg gtacatctga ccgcctcttc tgggaaccca |
| 51241 | tgaaggttca cgacatccgc tggaactttg agaagttcct ggtggggcca gatggtatac |
| 51301 | ccatcatgcg ctggcaccac cggaccacgg tcagcaacgt caagatggac atcctgtcct |
| 51361 | acatgaggcg gcaggcagcc ctgggggtca agaggaagta actgaaggcc gtctcatccc |
| 51421 | atgtccacca tgtaggggag ggactttgtt caggaagaaa tccgtgtctc caaccacact |
| 51481 | atctacccat caYagacccc tttcctatca ctcaaggccc cagcctggca caaatggaKg |
| 51541 | catacagttc tgtgtactgc cRggcatgtg ggtgtgggtg catgtgggtg tttacacaca |
| 51601 | tgcctacagg tatgcgtgat tgtgtgtgtg tgcatgggtg tacaRccaYR tgtctRYcta |
| 51661 | tgtgtctttc tgggaatgtg taccatctgt gtgcctgcag ctgtgtagtg ctggacagtg |
| 51721 | acaacccttt ctctccagtt ctccactcca atgataatag ttcacttaca cctaaaccca |
| 51781 | aaggaaaaac cagctctagg tccaattgtt ctgctctaac tgatacctca accttggggc |
| 51841 | cagcatctcc cactgcctcc aaatattagt aactatgact gacgtcccca gaagtttctg |
| 51901 | ggtctaccac actccccaac cccccactcc tacttcctga agggccctcc caaggctaca |
| 51961 | tccccacccc acagttctcc ctgagagaga tcaacctccc tgagatcaRc caaggcagat |
| 52021 | gtgacagcaa gggccacgga ccccatggca ggggtggcgt cttcatgagg gaggggccca |
| 52081 | aagcccttgt gggcggacct cccctgagcc tgtctgaggg gccagccctt agtgcattca |
| 52141 | ggMtaaggcc cctgggcagg gatgccaccc ctgctccttc ggaggacgtg ccctcacccc |
| 52201 | tcactggtcc actggcttga gactcacccc gtctgcccag taaaagcctt tctgcagcag |
| 52261 | ctgagcctac tgtgtgtggt gcttcttcaa tggtggccgc ccccgcctgg gtgggaagtg |
| 52321 | aggaggagaa ggtggggcag ggtaaaggSg ggaggatgag aaaagaacaa atatgacaac |
| 52381 | aaaaactttt tacagtgggt gcaaaggtaa ttgcggtttt Ygccatatgg caaaatccaa |
| 52441 | ggctacctcc ccaccccaca attctccctg agatcagcca aggcagactg caagggccat |
| 52501 | gtagccctat taggggtggc atcttcatga gRgaggcccc cctgccacaa aaaaggggca |
| 52561 | aaaattgcaa ttactttttc aacaacctga tagttagctg cagtggcgca ctccttcagc |
| 52621 | tacttgggag actgatgtgg gaggctccct tgagcccggg agtttgaggc tatagtgtgc |
| 52681 | cRtgactgag tctgtgaaga gccactgcac tccagcctgg gcaacacagt cagactgtct |
| 52741 | cttaaaaaaa aaaaaaaaaa aagagagaaa ttagacaatg ctttgagtcc ctgctttttg |
| 52801 | gctcctacct tggcccactc tgcttctctc actcagcatt tggagtttat aaaaccagtt |
| 52861 | ctgatctact ctcattccct cccacagttc tccaagtcag ctgaggttaa gatgaggtgt |
| 52921 | tctgtttgac ggatgaggaa actgaggctc acagaagggc cacgccttgc cccaggtctc |
| 52981 | ctgatgagtg aggggcagga ctggaattta aacccaagtc ccctgagtcc tggcctaggc |
| 53041 | tccttccact gccccggYtg ccctaccctc agggaggccc tgatacgtca ccattactca |
| 53101 | agagtaatgg tgaccatctc agggaaagga agaaaagggg aacagaagga gggacccagg |
| 53161 | aaagcagggg gttgacaggg gaacatYagc gcataaatga acatgagtca gaatgttgat |
| 53221 | cttcttcaac ttggatttat gtccatgatt cgtgcaaata gctatccagg gatggacagc |
| 53281 | caccctaatc tgggcttctg gcaccacagg cctccagcta tggggtccag ggtctgaacc |
| 53341 | tcagggcctg gcagcttcag gctggcgccc ctcggcRgac gtggctggca tggccttctc |
| 53401 | ccatctgtga tggcttcagc aaggctactg tgagtggtgg tggagagggc cccagagcca |
| 53461 | gaatatccat cattctcttc tgttctggag acaaacccac acttcccaca gctcctcaca |
| 53521 | gaggggtagg ggtgtgcgtg gggcaggtcc tgctacagag cttgaagcaa aaattaaaca |
| 53581 | cacacacaaa ttggtcatgg caactagagg gcctgaaacc acttccggga ggttttgaag |
| 53641 | gaagggggtc ttggctgcct cccactctta ggattgctgc tcctggaggc ttctgcaaYg |
| 53701 | gatggtgggt caaagccgga tgaggcctct ctccactcag cagcagggaa ggagtttttc |
| 53761 | ccagtcactc ccagcagagt acaaatgaaa gccttctggg tggagcctcc ccagtcctgt |
| 53821 | aaacagctca gttcagggac tggtRtacaa gctggccacc catctcagcc tctcatccag |
| 53881 | ctgaggctct ggccacaccg tgcaagtggc ttctagtttY ttggcaatMt gagatcagct |
| 53941 | ggctctgcaa gatgaaggtg gagccaaatg acacaatctg gtctcactga ggcccctcac |
| 54001 | ggtcattttt tggagactct aaataaacaa aaattttgag gacttcatga ttatgtggta |
| 54061 | gagcgagttt caaagtctct tatggaatgc agtgcaggaa cagtgaaaat aacagctagg |
| 54121 | gttactgggt gctaccaagt gccagggcta agtaccttaa gtacgctggt catgtaatct |
| 54181 | tcacccagcc ctatgaagaa ggcaggttat tatcccattg taaaagaggg aactgggaca |
| 54241 | ctaagaggtt ttaaatgact tgctcatagt tccaggtcca ggaaatagtg gggctaggat |
| 54301 | ttgaacccaa tctcaaatcc tggagcagtt ctggggaggg agcccctccc attataccaa |
| 54361 | tctctaccac tcatcaaagc agcctccaag gggctccact gaacttgtag ggttcttcag |
| 54421 | ggaaaaacag aaaatgactg agcagcccaa tcccttcttc caatcaccaa atcctccaaa |
| 54481 | ctgcaacccc tccaaggtgt ccgtcccatg gcctctactc acacacctgc aaagggacac |
| 54541 | tcgccacctc ccagagctgg ctccatttct gcacaactgt gtcccttaga aagaaagttc |
| 54601 | ctcttcatgt tgcgatggac ttggcctccc tgtcattccc acccactagt tataattctg |
| 54661 | ttcccagaag tcccacaggc gaggtggtgc cttgtgcccc atgagagctc tacagggagc |
| 54721 | aatggcagtc gctaaggtcc caatcttttc acgagtggac acagctccag gctcttcagc |
| 54781 | ctttcatggt ggacaccatg gtcaggggag cttttcaaac agaaatatgg tcatgccact |
| 54841 | ctgctttaaa aatgtccagt gactacacat tatgctgagg ataagaccca ggcctcccac |
| 54901 | catgctccgc aggcctgcac ggtcaggacc cggctacgtc ctgaaccctg cgttgcccct |
| 54961 | ctctttccct accttgttct tggctccagc cacgctggtc ttccctccga tcctcaaatc |
| 55021 | agctccccta cttcccctcc tcccaccacg gcctctgcat ttgtcatgtt ctctgcaaaa |
| 55081 | gcatcctcca cccctacctc tccacctagc tagtgtcact cattctgaga gtctcaactc |
| 55141 | aaatgctgcc cccccggtct aggtcggctt cctctgctat ctgctcccac agaaaccggc |
| 55201 | tcttcttcct ttagggcact tgagtgcagc ctgtttgtgt ggtgtttgtt tattcatttc |
| 55261 | tgcctccctc attagacatt acgctgtata agggcaagga ctgtatctgc ttctgttctc |
| 55321 | taggcatcca tagcacctag cacaatgcct ggcattagat aatgcactag aatgaatggt |
| 55381 | ttcagccccc ctcactctgt ggttgccatt actctccatt caacactgtt ttggaaagct |
| 55441 | gggcctctcc tccaccaaga gcagaaacta acRacatcac ccccaaactc aggcaatgct |
| 55501 | ggcagataag atattatctc ccccagggag gaccaagact cagtattagg ggctcacctg |
| 55561 | gttctgtagg cctggctgtg ggagggtcca tcacttggga gctctgattt ggatttcgaa |
| 55621 | cccctccaca gggtagacgc caggtgtatt ccggctgcga caaaactggt gcttaataat |
| 55681 | caataatcaY acccaaaaat tacaatagca cctactgtgc caggacaata ctaaatctgt |
| 55741 | attagtcaag tataattgaa tctttataac aacccaggct ggcactccca tttcacaggt |
| 55801 | aaggaatctg aggctcagag gggataactt gctgaaggtc atctagcaaR gagaatggct |
| 55861 | aagcttggat ttgaatccag gtctttgtaa atccagagcc aatctcttaa gcgccatact |
| 55921 | atatactctg gtgtttaaag atgtgtacca agaagggtca tatgggagaa gctgaaaaag |
| 55981 | aggccagcca ggaggtttct gtaatggtcc aggggagagc tgggatgcct aaggtggggc |
| 56041 | tgtggcagag gactggggaa aatgggacaa gtgacagcag atctttggaa gaagaatgat |
| 56101 | aagaagggaa aagaggccag gcgcagtggc tcacgcctgt aatcctagca ctttgggagg |
| 56161 | ccaaggcggg tggatcacct gaggtcagga gttcaagacc agcctggcca atatggagaa |
| 56221 | accccgtctc taccaaaaat acaaaaaatt accgggcgtg gtggtgcatg cctgtaatcc |
| 56281 | cagctacttg ggaggctaag gcaggagaat agcttgaacc tgggaggcag aggttgcaat |
| 56341 | gagccgagat cgtatcactg cactccagca tgggcaaaaa agagtgaaat tccatctcaa |
| 56401 | aaaaaaaaaa aaaaaaggaa aagaaaataa aaaaagagag gagagaagaa gaggagggga |
| 56461 | ggggagagga gcggagggga ggggagggga gaggaaagga aaggaaagag agagaaacat |
| 56521 | ggtgaggctc tggaacctag ttacacgtgg aagttataag aaaaagcaaa cccaaactct |
| 56581 | gatacccatg gcctggggcc tggagggagt cctccttccc accctgcact cttactcagc |
| 56641 | cttctccgtc ctagaccagt gaccctgaac agctgtgggg cagccctgcg ggactgtggc |
| 56701 | cagatccctg cccctgggta gcagcccaga gccaggccct ggacacccac ctgccaccac |
| 56761 | Rgtgctgttt agttcagaag gatgcagttt ctgaacccct cacttaacct tcctctctgg |
| 56821 | aaggtgtctg gggcagcctS tgtgtgtgcc ctggagcaag ggagggacac agactcacca |
| 56881 | gatggaagag gcgcgagttg gggagtgggg gcgggtgctc catggccatg gggggagggg |
| 56941 | ggtagcggat ctgggaccag tcctcgaagc catggtgtgg caccatggct ggcatgggcR |
| 57001 | ggtaggcgta ggggtaggcc ccgcagagat gttctgggtg gggctccaca tggtaacgct |
| 57061 | ctcctgaggc ctgcaagaaa ggctgacgtc tggctttggc ctgcaacagg ctgcaMagga |
| 57121 | cacccatctc atcaccctct aaatagaatg ttagctctct gaaggctagc aggctgggta |
| 57181 | ccaaaggctg gtatgtggtc atgaaaggct gctacatggg tacagaaatc tggatacatg |
| 57241 | ggcatagaag gctggatata tgagcatgga aggctgcatg ggcatggaag gctgggtaca |
| 57301 | catgcatgga aggttgtgac atgggcacag aaggctggta catgggcacg gaaggctggt |
| 57361 | acatgggcat ggaaggctag tacatgggca cggaaggctg gtacatgggc acggaaggct |
| 57421 | ggtacatggg cacagaaggc tagtacatgg gcatggaaag ctggtacatg ggcatggaag |
| 57481 | gctggtacat ggacacggaa ggctggtaca tgggcacgga aagctagtac atgggcacag |
| 57541 | aaggctgcta catgggcagt gaaggctggt acatgggcac agaaggctag gtacatgggc |
| 57601 | agtgaaggct ggtacataga cacggaaggc tggtacatgg gcacggaagg ctagaacatg |
| 57661 | ggcacagaag gctggtacat gggcacggaa ggctgggtac atgggcacgg aaggctgggc |
| 57721 | acatgggcat ggaaggctgg gcacatgggc acagaaggct catacatggg cacggaaggc |
| 57781 | tgggtaaatg gacacagaag gctgggcaca tgggcacgga aggctgatac atggaaacgg |
| 57841 | aaggctgagc acatgggcat ggaaggctgg tacatggaca cggaaggctg gtacatgggc |
| 57901 | atggaaggct gggcatgggc acaaaaggct gggcatgggc acaaaaggct ggtacatggg |
| 57961 | cacggagggc tggaacatgg gcatagaaag ttggatacat gggcacggaa ggctcataca |
| 58021 | cggccaaaga aggctagtca catgggcacg gaaggttgct acctggacac agaatgtcaa |
| 58081 | cagtgatgac agctaataca ttgtgggcac tgcctctgta ccaatactgc tctaaggctt |
| 58141 | ttcctgtatt actcatcagt tagttagcag aggatgtccc cacgcccgag cacacactgt |
| 58201 | gcatccatca ggctagctcc atgaggaagg taagaggatg tcagtgctgc tacctccctc |
| 58261 | aagcctcctc acctttgctt tcctcttctg ctgtctgagg gcttctcttg ccttctcctc |
| 58321 | atctttgaat gcttttagct gagagaagaa gggagggaga aaagactgtc ggcacaggtg |
| 58381 | gtttctggcc aggcctggat ccagggccta accagccaMR aggactgacc ggctgatgct |
| 58441 | tccctctggg ccaccatgcg tgggccagcc ccgggaaagg gccctgaggg cggagcacag |
| 58501 | cccaggctgt tgctgcaggc cacctgcttg tcacagtggt ctgtgcacag gtcaagaggg |
| 58561 | ttcacgtgaa cctcgctgct tctctgctaa catcttttag ttccactctg ggagagtaaa |
| 58621 | gcccagaact gactgtggaa agtcagaggt agagatatct tagagtaaaa ctcgtaattg |
| 58681 | tacaaagaaa gagtcagaga ggggaagggc cttgccgagc tcaaatatga ttgcagagct |
| 58741 | ggagagaagc agtgagggtc ctgacatcca gcctcaccag ggccctccaa tccatgcccc |
| 58801 | ctctcccSac gaggacaggc cagttgccct tcctgggtcc agtcactctt acctgggcat |
| 58861 | ttgacagggt gacctgggcc tgcagcttct ccacttgctt cttcaRctct tccttctcct |
| 58921 | cattcatgcg ctcacgatca ctgcgctccc tctggaagtc ctcctcgaag atcttcacct |
| 58981 | ggtgtggagg gagggtgaag agagggaggg ggatggtcct gagtggggat ttctcctcag |
| 59041 | gcccagaYtc ccatgcctcc tgctggggtc acagatggca gagctggggg tcgccatggg |
| 59101 | gagtgggaca gctacacctc cagcctccac cttaacttca aacagagtag ttctgtgtcc |
| 59161 | ctctatctta cattctgggc ttcaagStag gactttattt gaacaaagga tatatggttt |
| 59221 | taaaaaaacg ttgaaagcca tcaaccagtg caatcctttc actccgctga gacccacagg |
| 59281 | ggcagtgatc acagaaccag agtgtggtgt agaccagagt ttggatctgc tggttctgag |
| 59341 | ggcagagacc ctacaaactc Ygctagggct ccagggtgcc ctggcagagg tgggttgggt |
| 59401 | ggggcctgcc tctgtctctt agcctgtagt ttcacatcct tagtgcagat cagctgagac |
| 59461 | actggctagg ttcaaggcag tttaggagga ttaaatagca cagagacaat gggagagcca |
| 59521 | caaccttttc gctttctttc accccaatcc ttctgtgtcc ctcagggcta gtaggtcttt |
| 59581 | aataccattt tagtacctgc caatctcctt taaataaagg agaaaagaac tccagttcag |
| 59641 | agtcttcatt tggcaagagt atccggctag agtttaataa cattgttctg tttttattgt |
| 59701 | ttattgcgta cagttacttt ctacttgtga caaataataa atggtttttt ccaattacag |
| 59761 | cagtgatata aagctccctt ttaaattcat ttatttagaa tttatttttt aaatactagg |
| 59821 | taaataatag cacgtgtggg gcatagagat ggctaaatca taaaggtggt agaggaacga |
| 59881 | cttaagctag ggttatggtg ctggaaagga taaacctaga gccagtgggg ggccctggcc |
| 59941 | aatggccaga aagtggatta ctaattacag gttccatgtg attccaagcc gtctgggccc |
| 60001 | tcaggaaagc tccagctccc acagagcacc tcccacctga tttcctcccg gaagcctcac |
| 60061 | ctgctgtttc agcaactcat tctgcgtgac cagctcctgt ttccttagga gggcccctgc |
| 60121 | tccttctggg ctcccaaatg ctgttggtgg agatgatggc ggggtttgga tgctcagtgc |
| 60181 | ttcctccagg gcctggaatc aggaaaagat gggaccatca gcaggaaccc ctggaaatca |
| 60241 | gggccctttg gaggggtcat cctcagggaa ctccttccta ataataatca tactaataat |
| 60301 | agccaccact accagtccta tttaataaat gctgccctat ttatttgcat tctacacata |
| 60361 | tcatttcatt ggatcttctg cacagtgcca tgaagaaaag actatgatca tcatcctcat |
| 60421 | tttacagatg tgaaaactga ggctcagaga cctgaagggg cttgtccaag gtcaaggtca |
| 60481 | cacagctagt aagtggcaga gcacagattc aagcccagca catgctccta cccagcaggc |
| 60541 | taaactgggg ttgtcatgca gaaggggaaa cctccccttc cctgaacatg tgtggctcaa |
| 60601 | ttcttagcac ccagacctag aaggaagatt aagtcctccg ggggaagctt cagtctcccc |
| 60661 | aacaactgcc ctgccctgag attcttcact ttcagcaacc cattcccatc caaaccaccc |
| 60721 | cttccatcct caacacttat gtacatagag aagactggat ttaatttctg cttagttaat |
| 60781 | attttccctt tctaacactg aaaatgggct gaaatatcat caaataacat tttgaaaata |
| 60841 | aaaaaatact cttaatctat catgttcaca atagattata taaacagtgt gcccacatct |
| 60901 | tcttaaaggt ttcagttaac cgtgtttccc ctttaactct gttaacatgt tactcagaac |
| 60961 | tctggaacat gtctcaagac tgggcaccct ggactttggc cccaggacag catcgcccat |
| 61021 | gggcctccct ggaccgaggg gagatagaga cctggcccaa cttggactcg ggcttccacc |
| 61081 | tggtctcctc agctccccta gacacgcaaa gaaactgcag gaccgagagt aaattcagga |
| 61141 | tgctccgagg ggaagttatg gctccacttt atcttcctac tccaccccac ttttaaatga |
| 61201 | aaagactgag gtccagcRac agggagatgc ctaggtcatg agcaaagaag gccacatgcc |
| 61261 | ctgcattact catccacatg gtgtctgtcc ctggctctgc caagaaaacc tccaaggtca |
| 61321 | tctttatgat cagcaacatg gacaattctc tgcctggatt tagagcccca agtcccccag |
| 61381 | ctcaggacag atcgcgtttc tttctctgga aacaggtcaa gggccccaga cttggcataa |
| 61441 | tcagtgttta caaaacacca aaaccaaaaa gaaagggttt ccccagcagg cctaggaatg |
| 61501 | ctcaactcat gccagagtcc actgtcacca gggtcaggag gcagagggaa aggaaaaaca |
| 61561 | attagcacga aacgaaaagc tgagccatga acttaactcc tccaggccct cagagaatgt |
| 61621 | ttcctttcaa agctccctcc tgtcagcttg catctttgaa atgtgctgga aagcaggcag |
| 61681 | aactagagcc gttcccaccN gggctcggat ggcaaaactg aactggagag gctggagagg |
| 61741 | ctaagctggg actagaccac tccgcttggc teagaccaga gggtttctgg tttcctcagc |
| 61801 | ctctaccctg ggggccccat ctccctggat cccactgcac aagggcgggc ccctcagccc |
| 61861 | gtgctcctcc actcccatca gtgtttgctg aacatgtgct tgatgccagg cgctgtacaa |
| 61921 | ggcgcccagg gtatacacct tggtgaaagt atgcacctcc caccaccaga tgggaagaca |
| 61981 | gaattaaata agtgatgacg agccatgaga aggagtgtca gagaagttgc tggtacctca |
| 62041 | ggagcataga ccagggcaac ctgaatgaga ttctgggaag gctttgctga gcaagtgagg |
| 62101 | gtaaaacaaa ccctgacaag cagggtgggc aggtgaggca caaggggaag agtgcacctc |
| 62161 | cagagggaag ggtgacacag gctaattcaa gggctgagtc actcccagtg tgggaggcaa |
| 62221 | tggcagagca ggcgggaaac aggatgccag ctcactgact gggggttacc cttcctaagc |
| 62281 | tgaatggttR ggggtgccag tgatggggtg ggcattgcag ctggactcaa gggagcccag |
| 62341 | ccaagggacc cgggccaagg cacccacctt gttgagccgc tggatctcct tttcctggta |
| 62401 | ctcacgctgt cgggtgagtg ggctcagctg atcctgcagg tacttgacct tttggcgcag |
| 62461 | ctccttggcc tctgctgtca gctgctcctt gtcggtctgc agggaataca aggttggtaa |
| 62521 | gctggctagg atggcctctc caggaggcct cggattctct gtcctgcctg gcccagccct |
| 62581 | tacgttctcc cctggYcatc acttcacaat gctcacatgc aaagcacctg gggtcggtac |
| 62641 | agtaatgtcc atccggtcct gccctcaatt attatgtgtc aatttaaaat aataattaaa |
| 62701 | aaaagaaaaa gcagtagctc agttgagtaa aagaccctgg attccgacac cagttcatcc |
| 62761 | actaagcagc tgagacccct ggcactgcca cagccctctc ttgtctaagc ttacctacct |
| 62821 | gtcacaggta cggggttcct aacgtgagtc acacagagac ctcaggaggc ctgtgagccc |
| 62881 | caaaactgaa tgcgaaattt tgttgtgtgt aatctgctag aaagaaaagc catagttctg |
| 62941 | accagattca catgggggtc ttccgtgatc cacagaaagc gataaactac ggataatccc |
| 63001 | taacagacac tgcagctcat acagccttgg agcctagagg agagatgaca cgcccagaga |
| 63061 | gaactgtgac ataaggcaga gagtgctcct ccagaaagaa acaaaatact gtggggctaa |
| 63121 | aagaaagatc accacagctg agggaaggct tccaggaggc ggttccatac cctctacgga |
| 63181 | accagcaggg cttcgccaca gccagccaag actgggatgg cctttagaca gcatcaagcc |
| 63241 | ccagccctgt aatacgatgg gaaacaaatg tccagagagg ggaagtgacg tacccaaggc |
| 63301 | cacacagtga gctggggcta gaacccaggt ttcctattcc cttgctctct ctccttccat |
| 63361 | gtcaaaggag gtgttgaaac taggggatgg cagcacagtg cagtggaaag accaggcaca |
| 63421 | tccccaaata aactatatat tcctatgtgt acatatatgc gagaaaggtc tggaaacaga |
| 63481 | tgcaccaaaa tggtaacagt ggttccctct agggagggcc tgggatcatg gcagtgggag |
| 63541 | gtagtccagg gaaactttca ctttgtagca tgtggacatt tcataactgt gtattcacag |
| 63601 | catgtgatta agagaccagt cgcaggggtt agttttcacc cagccctgtg tgacctttag |
| 63661 | tcagtacgga ctgcagaggg caggcttggt cagacctccc tgggaattgt tctggactcc |
| 63721 | ccatcaagag gctcccggat gggcatgggc tttaccgaaa ttcatcctta tctacagggc |
| 63781 | cacgccttgt catgaaacgt cctaccttcc ctgtagctga cagggaagag ccctcacatt |
| 63841 | ccagggattt gtctcaccta ccactgtgag caagggagag gggccaaaga gccaggatgt |
| 63901 | ctggctgcga gtcaccaggt atgactgtgc actcataagg aaagacagaa gtgttctccc |
| 63961 | taccacacct ccaaggtaag ggggtgtcac agacgtaggc tgactgctca aataaggccc |
| 64021 | ctggtgtccc atgctgacgg gaggaactSt gaaaggcaat ccaggttgaa aatgtccatt |
| 64081 | tttaagctag gcaaaagacc atgcccagtt cccatgaagg ggaaaacatg gtgacataaa |
| 64141 | taaaatctcc caagagtctg gcagtcaagt ggcctttcct ctttaagctg ctccaaggtc |
| 64201 | ctgatgggcc ttggctggtc tcattcatac atatgactgg gcagatacta ctacttcagg |
| 64261 | ggacctgttg tttcccccca agaaagaatc tggtctcact tatgcccact ctctgatctc |
| 64321 | tgtaacttct tcttcgtagt actttttttt tttttttttg agacagggtc tcattctgtt |
| 64381 | gcccaagctg gagtgtagtg acacaatctc agctcactgc aacctccgcc tcccgggttc |
| 64441 | aagcgattct cgtgcctcag tctaccgagt agctgggact acagacatgc gccaccactc |
| 64501 | ccagttaata tttgtatttt tattagagac ggggtttcac catgttggcc aggctggtct |
| 64561 | caagctcctg atctcaagtg atccgcccac cttggcctcc caaaatgctg tgtttacagg |
| 64621 | catgagccac catgcctggc catacatttt tcttttagag aaacagggtt tcactctgtt |
| 64681 | gtccagtctg gagtgcagtg gcacaatcac agctcactga agcttccaac tcctgggctc |
| 64741 | aagcaatcct cccacattag cctgagtagc taggtctaca ggtgcacact gccacaccca |
| 64801 | gtgaattttt taatttttgt agagacaagg tgtggctatg tcactgaggt tggtctcaaa |
| 64861 | ctcctggcct caagcaatcc tcccacctcg gcatcccaaa gtgccaggat cataggcaca |
| 64921 | agccacccaa cccggccttc tctgcaacac ttaacacact tttactttat ttgcttctgt |
| 64981 | aattagttgt ctggcacctc tttcccagcg agggcagggt tgagctgttc ctgtggactc |
| 65041 | tatgccaaag cacaatgcct gagacaggct ctgaagacaa atgccgggat gaatggataa |
| 65101 | atgaagctct gtctcatgtt gtagcccctc cccaacaaat caccatcact atgctgaaca |
| 65161 | cttggcagca tcccacccca ccaagtgcca tacagcaggc ctgcttggat cttttttttt |
| 65221 | ttttttttta gcaagagttt cactcttgtt ccccaggctg gagtgcgatg gtgcaatctt |
| 65281 | gactcactgc aacctccgcc tcccaggttc aagcaattct cctgcctcag ctacctgagt |
| 65341 | agctggaatt acaggtgcct gctgccacac ctggctaagt tttgtatttt tagtagagat |
| 65401 | gggatttcat catgttggcc acgctgatct tgaactcctg acctcaggta atccacccgt |
| 65461 | ctcggcctcc ccagttgcta ggattgtgag ccatcgtgcc cggccacctg cttagatctt |
| 65521 | ttatatggtg tgcttccctg tacagttccc cattccctac aattttaatg gaacaaaaag |
| 65581 | ttctgaataa aaacaagaaa atgtgaaaag ctgtagttaa tgtaactttc tcaattttca |
| 65641 | gatgggaaac tgcagtgcag ggaaggaacg tgcctgtgtt tttggtcacc tagctctttc |
| 65701 | gcactagacc cccgggtctc ctgactcctg cccctggctt gtttgctcca cagaactctc |
| 65761 | cgctaatgtg gaggggaact gactctgcag ggaccagcag tcacacttgc ctcctccatt |
| 65821 | tcaatcttgg acttggccag gaggagcttg cggtcaaagt cacgctgctt ctgctcccgc |
| 65881 | tcggcctcca ggtcagtcac ctgcttctgc aaatcagcca gcttctgacg cagctcagtg |
| 65941 | atctgggttc agaggcagag aggagtgtgt gaggcaagga tgtagagcac ttgcaggatg |
| 66001 | tgggcagggc ctggctgccc ctgggccctc caacactgcc cccaacttct cctctgggcc |
| 66061 | atactggggc tcagcgKgKc cactcYccaa ggttcaaagc tgctaaagag gcagMgagat |
| 66121 | gaagaccagg catgccctgt gggcgtggcS aggaacccca cattaccttc tgctcatact |
| 66181 | gctgcttcat ggaccggaaa tgctggtccc actgcttgtt cacttccagc agctgtgggg |
| 66241 | agagactgga gttagcagga gatgagcaga gaaggaacaa ggagagccat ctcctgcccc |
| 66301 | atgtacacca gcgtcccaag gtgtgctcgg tgtgtgtgaa tagtggctac agacactgtc |
| 66361 | tccatccctc agctctcgaa aactcaatgt tgctcaaagc catccacctt catccactgc |
| 66421 | tgcattttac cttgccagga aagcaagatt aacactaaga catggaaact acatMgtttt |
| 66481 | ggtgaataat tatggaacac acacacctct ttggagggca gtctgggatt atgtattgaa |
| 66541 | atttcacatt ttcatcaact ttaaaccaat aattccactc tgaagaattt aaccaataga |
| 66601 | aacacttaca caagtgtgca aatatatata cacaaggcta atcatctcag caatacctgt |
| 66661 | attacaaaaa aatccagagg ccaatctaag cacagaagat aggttaaaga aacgatagta |
| 66721 | taaacagaca atgtgcagct gttaagaaaa taagaaaata ggccgccagg cacagtggct |
| 66781 | catgcctata attccagcac tctgggaggc caaggtgggc caattgcttg agttcaggag |
| 66841 | tttgagacca gcctggagaa tatggcaaaa ccccatctct acaaaaaata caaaatttag |
| 66901 | ccgggcatgg tggcacgcat ctatagtctc aactactcag gaggctgaga tgggaggatc |
| 66961 | acctgaactt aggaggtgga ggctgcagta agccgagatc atggcactgc actctagcct |
| 67021 | gggcaaccaa agtgagaccc tatcttaaaa aaaaaaaaga aaagaaaaaa agaaaacaga |
| 67081 | aaataaagca cctaacacac ttcctcagtt tgaagatgac actatccacc atactcttga |
| 67141 | tataacaatt cctcagggaa gaaaaacaac cctacatcat caactaaata aaacaaaagg |
| 67201 | agtattggcc ctgcccctta agatatgtca taaggatcca caccaatttc aaaaacattg |
| 67261 | catatgataa aaaaaattac aaagaattaa aggaatatag catatgttat agatatgaat |
| 67321 | agatactctc aaaggcagtt aatttttttt ttggaggcag gcctaggctg gagtgcagtg |
| 67381 | gtatgatcat ggctcactgc agcctcctga gctcaagtga tcctcccacc tcagctcccc |
| 67441 | caagtagccg agactacagg tgtgtactac cacacccagc taatttattt tttgtagaga |
| 67501 | cagggtcttg ctatgttgcc caggctggtc tcaaactcct ggttgcaagt aatcttcctg |
| 67561 | catcagcctc ccaaagtgct gggattacag gtgtgagcca ccacgcctga cccagttaat |
| 67621 | tttttaaaaa agaaaagaaa aaataatctg taaagcagtg tgtgtatata catatatata |
| 67681 | cacacacgta tatgtataat tttattctac tttgaaaaaa actgagggat attcaacaaa |
| 67741 | ctgtaatcag ttgtggtttt ctctaggagg tggtattctt gatctttttg taatgagcat |
| 67801 | tatatcactt ttgaaatcag aaaaaaagac gcttataaca atacaaaaag aaatctaaaa |
| 67861 | ctaatatgca catcaagaag ctttcaaatg tgcgggagga caaggggagg caggctcagg |
| 67921 | gttctagaga agcacctggg ctgtgtggag aggggctaga cggaacagac agaacaagtg |
| 67981 | tctaccaaaa aggagctgca cttcgacctc gggtctggaa agactggact agactggggg |
| 68041 | tgtgaggagg gggaggaaca catgtgagat ccatgggaag aggcggaatg gactgcagca |
| 68101 | cagggactct gctgcgtggc ttctctcttg gcagcagagg gaaactaaga gcctcttacg |
| 68161 | aactggctcc tgcaccttag tgggactggg ggacatttaa actacctaaa gacctggcca |
| 68221 | tcgccttaat ggagtttagg aatccactca gtattctgtg gcaggcttcg gctgctggct |
| 68281 | ggtccttttc attcttgcct aagaaaattc ttgaaatggg agtctcaaaa tatctgcaaa |
| 68341 | gtagctacac caatagaggt aggtagctat tttttttttt gagatggggt cttgctctgt |
| 68401 | tgcccaggct ggcacgcggt ggcacggtct cggatcactg caacctcagc ctcccgggtt |
| 68461 | caagtaattc tccctgcctc agtctgagtg ggtgggatta caggcatgtg ccaccatgcc |
| 68521 | cgctaatttt ttgtattttt agtaggcaca gggtttcgcc atgttggcca ggttggtccc |
| 68581 | gaacctctga cctcaggtga tccacccgcc tcagcctccc aaagtgctgg gattacaggc |
| 68641 | atgagccacc gcacccagcc aaggtagctt ttaacgttaa aaattttgac agtaaattta |
| 68701 | tggagcctcc aggctagtgg gaagcggcct taatcccttc cttccatgat gggtcctccc |
| 68761 | taaagcatct ctcaagggtc cctccactcc tcatcggtga tgctaaaact tgcctaactt |
| 68821 | atcacaacct ctttccacca tccaaggtct accataggag cctgcctaaa ctgtagcccc |
| 68881 | aacaatttta ggccatgccc cacatgccac ctcctcagag tgaccactgt aggcaaaggg |
| 68941 | actgatcaag agaggacagt ccagggcaag gagtcagacc tcatccatgg gcaggcaggt |
| 69001 | cagtggtcac catgccaact cctcatggtg acctgggacc tgccagagcc aggaggocag |
| 69061 | ggcaagcctt tgtgctgctg gtcccgggag gtaagaggga tcctcccact actgccacct |
| 69121 | cggccaccta cctcactgcg ctgctgctcc agcatcttca ccttcttctc ggctgcRccc |
| 69181 | aaggccacca cctctgggac cttacctgcY gtcacactag cctggggaga agcacagagg |
| 69241 | agccttcacc aaaacctcaa tacaaattat ctcacccagt ctcggtgctc ctctaagacc |
| 69301 | cctcacccaa gKggccccag ccctctgtct ccctattcct cccacccagc aggacaccac |
| 69361 | taaccatccc agtcatgact acgtcccctt ctagaagtct acaagatgat gattccccct |
| 69421 | ccctgactca gggtggctgc caggccctct ccccttccct tctcccctcc ctacggtcat |
| 69481 | tctccctgtt taggtacaac ctctaaggta ctaccagcca ctctcctcac tccctacaca |
| 69541 | catcagccaa aaaactctct ggcctggaag gtaagacatt tgagatgtag atacagacag |
| 69601 | atatagatat agatatactc attctataaa acatatatgt tttataaaac ttttacaaaa |
| 69661 | gttgaagtta tataaaatgt ttatttaaaa acatttttag aaagatgcag aaataaagat |
| 69721 | ctgtgtaata cacatagatg tttcccagct ctgtcctctg taaggggcta aagcagagac |
| 69781 | atccagcagc actgagcaaa cctagtgctc agttggtttc taaataccat tttcttttta |
| 69841 | ttaaaaagaa acagggctgc tttgaggggc tggagcagat aaaatataag gtgagtttga |
| 69901 | tgcatcttat agtgatggaa agtaaggaag tgctcaaatg aataatacta ataacaataa |
| 69961 | taataaaaga gcatgtcaaa agggcacaag agacaacctg aaaaaaacat ctatggccaa |
| 70021 | aacgggaaca ctttgaacag caaaatacat cacaatagta ttggattata agtcacagta |
| 70081 | tgaaataaat actcttgagt tcatactgat agaacaaaat agctgaatca ataaataaat |
| 70141 | gggggagaag ggacagctct tccttacaaa agaattctga ttaataagtg taggaagaat |
| 70201 | gaggaaaata tgaaatcacc attccattac tacagtaata actRctgcag gtggagatcc |
| 70261 | accaatggtc actaaaatca gtgagtgaaa gtttaagaaa aaatagagta tttgcatagt |
| 70321 | ctctaagttt ctcctcaaaa ataaacactt attaattaca aagggaaaat tggtcacttg |
| 70381 | attgcagaaa cttgaaagac agcacttggc caagtgatga aggttaacag tagtaaaaca |
| 70441 | ctgacatcat gtacccctgg tctgctggac tgagaaatat tctgcacact ctgatgtaca |
| 70501 | cagaacgtca cctccgtgag attcttgcca aaacacgtaa cctcaatctc ctcatgagat |
| 70561 | ccaatcactt gtgaggcctc aatcgtgaca gcaaataagt ctatactgaa aaacattcta |
| 70621 | caaataactg gccagtacaa ctcaaaagtt tcaaggtcat gaaaagcaag gaacagctag |
| 70681 | gaactgtcac agactagagg aaaatgaggg agaagagaca actgaatgca atgtgggatc |
| 70741 | ccagactcca tgctggcaca cgacaggaca tgagtgcaaa tctggtgaaa tctgaataaa |
| 70801 | gtctgtagtt tactaagtag tacatgccat taattcctag ttttgatcat ttaacctggg |
| 70861 | ttctataaga tgttgccgtt aSgggaagta aaggaagggg ataggggaac tctctagact |
| 70921 | atttttgcaa ctcttctgta agtctagtta taccaaaata aaaaggttta aaggttaaaa |
| 70981 | aaaaaaatag caagtgctgg ggtgaaacag cagacaaggc cagtagtccg gagggtgtgt |
| 71041 | gtcgactcta tctccaagcc cctctgtgat ggacaccaag accctcgtct tctctgggct |
| 71101 | tcaatgcgat gagaagctca aacagaagaa ggtctgcagg ccccatccgg acttctgaca |
| 71161 | ttgtctgcca tcatcctgga gtcagattct ctctattctc agcgttctct ttccagcgtt |
| 71221 | ctctttccct ccacactgca cccccaagtg gcttcaggta gggctgggtg cagagcttgc |
| 71281 | cccctacagg ctcaggcctg taagcacacc atagcaccaa ggagcaaggt gagggggagc |
| 71341 | cctccaagga aggtcacccc ctttgagaaa ggggacagac aggcctgccc acttgaaatc |
| 71401 | tgcggcatct tggatgggag ctgtgcttag caaaaaggtc aacaagttac cggggaagga |
| 71461 | ggaagagggt ggattccagg ctctagggtg gtgcaccctg aacctccgcg agggagagag |
| 71521 | gagtccacgt ggagtcagca gagctggctg ctggccccaa atctccccta aagagcaaca |
| 71581 | gctaacgttc actgtttacg acgctaaacc tactttacaa gcattgcatc actgaatcct |
| 71641 | cacaaccacc ccttgaggca ggtgttacta tcttcatttt acagaggaaa ctgaggccta |
| 71701 | ggagtcttat gtgacttacc caaggttgca gtgctggtaa aaggtggagc tagtattcca |
| 71761 | cctgcatgca attccaaggc acactcgtcg cccctctgta acacatgcct ctaatgagac |
| 71821 | aggtgaccct ggggcacaag ggcaagtcgc tcccactctc aggaagggca ggaagagcat |
| 71881 | ctggctcggg gcattcaagg aagaYgagtg gagattaaag ggcacaggaa aagtaaagag |
| 71941 | acctgtccag ggaattccac acctgaggca gctcagagaa cccaagggag aacagccgag |
| 72001 | tctacaagtc ccttccacaa gagggcagac aaggccggat ctgatttggg gaataaaggg |
| 72061 | aagaaaagag gatctccatg ggctgggatt cggaacacca gggaagagca gactttcacc |
| 72121 | atttatcagc atgtttccct ggccgtaccc tacatctgcc tgatagcagg tcacacagaa |
| 72181 | atcctgatta tatgatgtta cttgacctct ccaaacctat ggccatagct atagaatgga |
| 72241 | atactagtcc cagccttgcc tactctatag gtagagatga ggcccaaata agaWaataga |
| 72301 | tttgcatgtc ctgggtaaac tctacattgt cacacagtaa taaggaatta agccattacg |
| 72361 | gtaattgcta ctattgcata ggtgtagggt gggttaaaga cattgagccc tactgttcag |
| 72421 | ctattaaacc ccattaaagg gtgaagtaaa aacacgttgg taaagagttg ggactcagct |
| 72481 | ctgcagcaag gggaatggta acgactgggc aaggggtgca gagtctgctc ctgcttggga |
| 72541 | cctggatgtg gccagtgctg ggactagagg ataggggagt Rggccagccc tgcagcatca |
| 72601 | ccagaccaca cagacactag ccaacaccct cccctctcca ctttagaggc tccagagaca |
| 72661 | caatcccagg agcttagcag aatccaaggg agcttgctca accaacctaa ttctgccagg |
| 72721 | aatatcaaag atgttaaact gacttttggg aaccactctc taagacagac cttgacaaac |
| 72781 | tggaatgtNt ttacggaatg cacccagact gagcaaacga ctcaacacca ccttctatga |
| 72841 | gcaatggctg aaggaactgg agctatttag ccaggagaag agaaggctta tgaggcccat |
| 72901 | gaagccacag tgactaccag cagcctctaa gcatggaggt caggccaagY aaagaaaaaa |
| 72961 | acacgtaaca gctagaacct tctaccactg gcactggctg caggagggag gaggctcact |
| 73021 | gtcactggag gtggtaagca gaggctgagt acctgcaacc aaggatgcta cagaaggaat |
| 73081 | ttctgaccac atacctgctg ctgtcYagcc actgccttct tgcctgtccc ttccatcttc |
| 73141 | ggtgagcctg gccgcccaga cRcaccctct ttgttgccat tgctcatcaa caacttcttg |
| 73201 | agctccaaat tttcctccct gggatggagg taaacagaga aatcacaatg ctgaccctga |
| 73261 | gttaagaaac ctMcagggct ccttaatgct cactatcgca tgagttgcag ctgagcccca |
| 73321 | gggagtactg caggatcctg aaacctgccc tcctggaaaa ccaaaaaggg catcttcagc |
| 73381 | taccttgctc tcaatctgtg gaggtctctg attgtcaatg gcagggtttc cccagctgtg |
| 73441 | gaatttctat gcacacaaga ccttccggat atatccaaac actgcattaa ataaccctgg |
| 73501 | atcacattct agtgagaaag tgacaccctt tccaattatc ttcacatttc ttgtgtagac |
| 73561 | cacggagacg gtgcgagctt ggtgctaaca ggccctgggc acctctctag ttactcgcca |
| 73621 | gtttccctcg ttaacacaga aggtgcaggc tgcaggccca gagccttcaa tgtgcaatga |
| 73681 | tccttagcct gaatttatta acatcctttc actttcattg tatttagagt tatcttctat |
| 73741 | ttatcacagg taatgctgtt ttccatttac tctagttaaa gttgccttta taattttaag |
| 73801 | taaaaagatg aatcaaatta aagtaaaatt ctaagtaact aataaggcag gtgatagagg |
| 73861 | agatcataaa attagtgatg tggattcagg tctgactaaa atgtttcttc tttctttttt |
| 73921 | ttgagatagg gtctcgttct gtcacccagg ctggagtaca gtggcccaat ctcggctcac |
| 73981 | cacagcctcg actgctccta ctcaagtaat cctcccacct cagccacccc caacctcccc |
| 74041 | caccacacac ccccaccctc ttgagtagct gggactacag gcacaccacc acacccagct |
| 74101 | aatttttttg gtattttttg ttggggctgg Rggaggggtg gtgatgtatt tcaccaggct |
| 74161 | ggtctcaaac tcatggactc aaagcaatcc tcccgcctta acgtcccaaa gtgctgggat |
| 74221 | tacaggtgtg agccacaacg cccaaccacc acttctttat gttctatttg ccagctgagt |
| 74281 | ttccgcttga aaaaccaata agtaaaatga ctttcccaag gtcatacagc agagacttgc |
| 74341 | attcttgcct tctaatccgt gacttttttc cccagcttca gtttctgaat ccatggatgg |
| 74401 | ggtcaYtagg gctataaaaa ccccaaaagt gcatccttgg ccatccaaaa gcaaataaat |
| 74461 | tacacactga ttcaaaatag ccagtggctc agtagttaaa cattacttct gtggccatac |
| 74521 | ttacaaagtt tatattcctt ctctttctgt tgattctaat aagaaacagg agaggaggga |
| 74581 | aaaacagagt ggcaagtcct gtctgtgaca cgggcctttc ctatgtgcct gagcccagct |
| 74641 | ggtacccacc agatgactca tcacYcaaac tgtccaggac cacagtgcag gcaggaattg |
| 74701 | tggccactca caggatggag agcaaggagg cccaagttcY tgttgtaaga ctccaatcaa |
| 74761 | gtccctgcct ctccctgggc ctcagtttcc cctctgcaca gtgagaggtc tgtctgcatg |
| 74821 | atctccaagg gcttgtcaag ctctgacagt caagatcagt gtttcccaag gcgtgatcct |
| 74881 | gtgcctacct cgttcataat cacagagact cctggtgaaa tgcaggctcc taggtcttgc |
| 74941 | ctaagacctg tcaattcaga atcttgcaaa ggaaggaagg gaaggcgtat aaacttgtaa |
| 75001 | tgcctttccc tgaccctcaa ccctcagtta agtctaagcc ccctagtcca gtgggggagc |
| 75061 | tctcatgttc tcaggaagac agagcaggtt gggatggtga ccagcaggag gcagcaaagt |
| 75121 | cctgagtcct ctggacagcc agttcaccgt taacagggga gagaggcaag tgctggagga |
| 75181 | ggaaggaagt acaatctatg ctgaccttct tctgaagctc tcaaggcact ctatacacct |
| 75241 | cccaaggtgg caaaagggcc agagagaaaa taccaaaaga gccaaggaga aggatcaaga |
| 75301 | gacgtaacct ccaaataggg ctctgggcac agggcctcag agccacggtc ctcaacccag |
| 75361 | aaatcagtgc tgcacaccag cYcctcctcc tgcagccccM actcctcacc ccttctctga |
| 75421 | ggggcctgaa cttaccgcag cctctcggca gcctgatccY gctgttccag gcccttatcc |
| 75481 | aacttggcct tcagagcctc gttctccttc cgaagctgct cacacagggt ctgtggggca |
| 75541 | ggggaacaga cagggtgagg gaaaggaggg gcccctccca ggtgcaggct gagctagagg |
| 75601 | atggtggggg gcctgtagcc accccagggc ccaactcctt atcccctttg cctggcctca |
| 75661 | ccccatccct ctctaaggag ctaagccact tggccaccca cgtgtcctct cccttgggag |
| 75721 | ccaactacgg agaagcctga ccaagtatca gccatggggc cttctgctcc tccaagacag |
| 75781 | acagctccat cccttctcct tcatccctgc tcccactgcc gggaccccta ttccccacca |
| 75841 | gcctccccca gctgacttct acYcttcttt gaagtcttag tttaaatccc atctcctcag |
| 75901 | agaagtcctc cctgactccc cgatccagct acattaggct aactccgtta tccttgctca |
| 75961 | cagccccccg cttttacgct tctcagcacc tgtggcagat aaagctaaag aactgttcgt |
| 76021 | gctgctgttt tcttaatatc taccccctta cccctaatta attcctgagc tcccggaggg |
| 76081 | ctgggacccc taaccatYct cttgttcact gccagatccc cagcccccag ctcaaagttt |
| 76141 | gtggaaggaa caacatgact gaacagccaa atgagcaaat ggacaaatga gcaggcgagt |
| 76201 | cctagggggg ctgaaaggca caccaatttg caggtgtgag aggtgcccag tgttgccaag |
| 76261 | gggaaaacca gaagacaagg cattcagtcg ggacctcact atgccctcac gccctcacaa |
| 76321 | tgtggctgtg acacttggtt cctcctctac aaaagaaaga caactgtttc tctttttttt |
| 76381 | tttttttttt ttttttttaa gacagagtct cactctgttg cccaggctgg actgcagtag |
| 76441 | catgatctca gctcactgca acctccacct cccaggttca agagattctc ctgcctcagc |
| 76501 | ctcctgagta gctggaacta caggtgtgtg ccaccatgcc tggctaattt ttgtattttc |
| 76561 | agtacagacg gggtttcacc atgttggcca ggctggtatc aaactcctga cctcaagtga |
| 76621 | tccacctgcc tcagtctccc aaagtgctgg gattacaggc atgagccacc acacctagcc |
| 76661 | cagggacaac tgtttcttct ctgcctcctc tatagggctg ctgagaggga cagatgagac |
| 76741 | agtgagagtg gaagtgtcca tgaaccatca gtcacttgct tatgtgcggg gactcatatt |
| 76001 | ggaagctctg tgaactgggg gcatggaaga ggggtcgcca gactcaggac ctcacaggct |
| 76861 | ggggggaagg gaaggtgctg actagcaatg ctagcataca gtgtcagcac agagttgttc |
| 76921 | aatctttcca cagatcctca ctgagcacct cacctgtgcc aggtacattg ctcggtgttt |
| 76981 | ctccatatac tgcctcactg gtgcctcaca acttcctcaa agctaagtaa ctcatctcta |
| 77041 | tgttaaaggt agggaaacca ggtaaaatga tacagtctaa caggtgcaca gctgctaaga |
| 77101 | ctcatcactg gcggggagta aaactccaat tggcagaccc cacactggtg tctctttccc |
| 77161 | ctgtgatgaa agatcagaga agggagagag atggtgccca aaggagggga cagcctttga |
| 77221 | gctgggccag gaccagggcc attcactaaa cagccatctg ctgccttcca cctcccaggc |
| 77281 | ctgttgcagg tggatgcaac catgtgacta gttctggcca acaaaagagg tgtagaaggg |
| 77341 | acaagcatca ctcctggact ggcctacgca caattctcca gtctcttttt cctggtagca |
| 77401 | ggggctgatg tggatgcctc gtattctaaa gggcaccgga aagttgggcc cctgtctccc |
| 77461 | tgggactcta aggaactgtg tagagcagaa acaaacccct gccacacaga ataggaggga |
| 77521 | aaacttttgt tgtgtaaccc agggagattt cagagttgtt tcatttctga ctcacaaagg |
| 77581 | agactcttgg gaaggctgaa tggaggacac agccttcaac tggaggtggc tggacaatga |
| 77641 | gggagatgag gcttagcaaa cagagaacca gctgggcatg gtggctcaca ccagtaatcc |
| 77701 | cagcactttg ggaggctgag gcaggaggat cacttgagcc caggagttca acaccagtct |
| 77761 | gggcaacatg gcaaaaccct gtctctacta aaaataccaa aaaattggcc aggcataagg |
| 77821 | gcgcatgcat gtagtctcag ctattcaggg aactgaggtg ggagaactga gcccaggagg |
| 77881 | tcaaggctgt agtgagctgt ggtcgcacca ctgcactcca gcctgggtgg cggagcaaga |
| 77941 | ccctgtcccc caacacccct taaaaaaaag aaatcaaaaa attattgtta tgagtccatt |
| 78001 | caatgcctag cagagagcct tatgctatac ctgaccttga atatgtttgt ttagtgaacc |
| 78061 | aagaaacaca tcagtgaatg aatgaggagg aactggatca atacacctcc acccaggcag |
| 78121 | taaaaatacc caagatgcca tgtctctggg cgaggcctcc agggaacaga atggcctgct |
| 78181 | cctagtccct aagggaaggc caggacaagg cctcacttgc tgtcctaccc ttgcagtcta |
| 78241 | gagagctgtt tccttggagt ctctgggcca atgccctggg tgcaaaccgg ccaatggata |
| 78301 | gaatcatcag aggtcacaaa gatcatcacc ttccatccaa ggtgctacga gagctatgag |
| 78361 | ttcatttgat catttattat tttgtccttt cattcattca ccaagtgtgt atgaagtgcc |
| 78421 | acgaactggg aYgcaacagt gaatacaaca gacatggtgc ctgcccccct caagcttacc |
| 78481 | ttctagcaga gagtataaga aaaaaaagag tataagaaaa aatgtattaa ataaaattat |
| 78541 | tacaaactat gataagagct aagaaggaaa taaacaagga ggggactgaa ataaaaaata |
| 78601 | acaKaggttg gcaggacccc ttttaagggg cctaggatct atccccatct caaagctgaa |
| 78661 | aagtggatgc gcaaagtgct ctcaccccag gcaccttcct accctgccca cagcctaggc |
| 78721 | actgtgccag gctcaccttg ccagggttca gcctggatac cttgaagcct cactgacatc |
| 78781 | ttaaaggggt tcccttctct cagcctggct ctccaggcct ctgcctctcg ttcagcctca |
| 78841 | cctcccaaca cacccctccc ctccaggtgg gatgggcatc ctccgtgctc ctctaccccc |
| 78901 | acacctctcc tcatactgca tctccaacct gattgccctt catgccctcg gcaaccaagg |
| 78961 | tcacgcaagg gggactccca cttctgccat cagcggggca cttgagtgcc tgctgacatg |
| 79021 | aatgagacca cagatcagag aatggcctgg gaggagagtc tgcagggagt aaggaggctt |
| 79081 | caagtcatgg ctctgtcact aaggtggcgg gcactcagat cacgagcagt ccctcagaag |
| 79141 | cctccgtttt gccatcttta gaatggtcac caattataac tgaacacttg cccgctgcta |
| 79201 | aagcccacaa ggctaagacc ccctgcccag tgtggatgcc cgtcatgaac tccgaatggg |
| 79261 | gacctctctt ccagcatgga ctaggttctg gactgcactg ggtgcttcat gtacatggcc |
| 79321 | tcatttaatg cagcaatcta accatggagg cacttctagc tcatgttact gataggaaca |
| 79381 | ttgggggata gagaggataa gtgacttgtc caaggtcata cagcaataaa gggtcactac |
| 79441 | tggaaccaag gaccatataa ctccaaggtc tggcctggcc tagcaaggaa atctgtccat |
| 79501 | tccccacagc acagggaggc tttcaaaagg aattcaatag gggaggcagg ttgggatggt |
| 79561 | ggtcaagagt atgggctttg gaatgcgaga gatcgaggtt ccaatcccta cttcaccatt |
| 79621 | taccagctgg gtgaccttgg gcaaaaaaag ggctgcttcc ccacctgtga agtggtgata |
| 79681 | atgagggtgc ctaccctggg gggaaagagg cattatgaaa ggagttgacc tttgttccct |
| 79741 | cccttcccat cccccaaccc tgcacatgag aaataaaggc agggctgctg ggggtatccc |
| 79801 | caaccatgac actcgcattg cccatcccgt atttccccat ttccttcctc ttcctcatcc |
| 79861 | ctccccacaN cttccttatc ctgttcatca ccctgaacaa aaagcccgaa gtctgcccac |
| 79921 | aacacagSct tcagaagtcc ccatggtacc agtggattcc caggagcagg aaggtgggaa |
| 79981 | gagctcgggg ggaagcacgc ctgcctgtct cgggctgccc tccccacgcg cctcacctgc |
| 80041 | agaatggagg tgcgctgctc attcttgtgc accttggatg ccagtcggtt gaactccagg |
| 80101 | gccatgcggc ccaggtgggt gaagagctgg ccgtggtccg gctcctcggc acacacactc |
| 80161 | agcgtggtct ccaggcgctg caggtgcagc atcaggttgc cgtcctcacg ggScaggggg |
| 80221 | cccagcRcct ggagagggaa agggcacacg gcccactctt caccaaggcc tgagtaggcg |
| 80281 | ccgccagtcc attctccctc tgcttcctca tttctcatga ctcagtttcc ccctgtgacc |
| 80341 | ccagctcagc cccgggaaat tctccagtta tgcaggttcc ctgtctgggg ctgactcaca |
| 80401 | gggcagaacc caggactcac aggccactgg tggctccaca gcagcggggc caccatcctc |
| 80461 | ccacacactg ggccttgcag agtgcctgac agtaagtcac ttgtctgctg gacctcagca |
| 80521 | tcctcatcta ccaaatgtcc gcacaaccct tccctccctt caacctcaca gggttcttag |
| 80581 | gaggatgaat tgacccctga cagtaacaag cccagaaaag ggacatcact gcacagtcag |
| 80641 | ccctccatat ccatgggttc cgcatccatg gattcaacca actgcagatc aaaaatcttc |
| 80701 | taaaaaaaca aactggccgg gcgcgatggc tcacgcctgt aatcccacca ctttgggagg |
| 80761 | ctgagcgggc agatcacaag gtcaggagat caagacggcc tgagtggtga aaccctgtct |
| 80821 | ctactaaaaa tacaaaaatt agctgggcat ggtggcacgt gcctgtaatc ccagctactt |
| 80881 | gggaggctga ggcaggagaa ctatttgaac cagggagtcg gaggttgcag tgagcagaga |
| 80941 | tcgcaccaca gcactccagc ctgggcaaca gagcaagatt ccgtcccaaa acaaacaaac |
| 81001 | aaaaaactgt attgaacatg tacagaattt ttttcttgtc attattccct aaacaataca |
| 81061 | gtataccaaa atttagcatt tacattgtat taggtatcgt aagtaatcta gagatgattt |
| 81121 | aaagtatata ggaggatgtg tataggttat agggaactac tacgccattt tacatcaggg |
| 81181 | acttgagcat ccatggattt tgggtatcct cagggagttc tggaaccact ctcccatgtt |
| 81241 | taccaaggga catctgcata tacgtcctgc aacctccgcc tcctgggttc aagcgattct |
| 81301 | cctgcctcag gctcctgagg agctgggatt acaggtgtgc accactacac caagctaatt |
| 81361 | tttgtatttt tagttgagac ggggtttcac cacaatggcc aggctggtct tgaactcctg |
| 81421 | acctcaggtg atccacccac ctcggcctcc caaagtactg agattacagg cgtaagccac |
| 81481 | catgcctggc ctacacatgt gtcttctggg gaatggccca agcattcatc agcttctgag |
| 81541 | gacccaagac tcaaaacagt ttaaggaacc acagctttag ctatttcaga aagtcccaaa |
| 81601 | ctagtacagt atgtaagaaa taaagcacac cgtgggccag atagttgact ctttctctct |
| 81661 | agtctatctg gaatactcct accaaagaca ttgcctttgt tacaccaatt ccactcccaa |
| 81721 | ggacctgcag tgttacccta ctgcagacgg cactgggccc agctcccctg ctgggcatct |
| 81781 | aaggccctac agccgcaggt cccatccaca gcagcatcca gttgggctcc ccactttacc |
| 81841 | ctgcctgaac ccacacacac caggtctggt gtctctgcat gtgtcctctc tgtgtcctct |
| 81901 | ctgcctctgc aagttctgct catccttccc accctgtcca cggctcagct cctccagcag |
| 81961 | cctcccggaa acagttatgg gaatcacagg acaKcagagc tacagggagc ctcagagatc |
| 82021 | aggccgggaa accaagctat ggggaggagg aacttgccca aagttgccct gtaagtcagt |
| 82081 | ggcagaggta taacgagaac tgaggtttcc tgactcgcca tccagtgctc tgctgcactg |
| 82141 | acctcccact tctctgaact ctggaggaat ggcaatgact ataaccMcaa cttggcattc |
| 82201 | cctgaacacc tgtgtaatgg cgtcagtgtg ccgcattcta acaagaggaa atgctgctgt |
| 82261 | ttcaactctg catccattcc cccactgcct ctttccacaa aggagctgag gtggcagatg |
| 82321 | ctgctctatt taaggctcat gcgatgcttc ccatgcctgc gacttctcca gactacaagc |
| 82381 | ttcagagcac agggaggctg tgttgtcttg gctcaagtgg ctcagcagag acaggcacac |
| 82441 | tgtagagcta atgaggaact tactacgtca gttaaagtta tcggtccaaa gtcagagtga |
| 82501 | aacactttct gagcagggga tcttgcctcc atggccagca tctcagagcc ctcagggaca |
| 82561 | gaacaggaca aggggacaga aggttccagg cgacagaaca taaagagcct ttccaatact |
| 82621 | cagagctgcc tgaggcagtg gtgagcctct caacactgaa ggcatgctag ttagccagac |
| 82681 | agccacctga gggggccYtg cactgggcac tgacaggtac atggggcaac cagtgaacac |
| 82741 | aagcatattt gtcagccaaa cctttgtgaa gggaggcagc agggatcaat atatcagtga |
| 82801 | agggctagag cacctattgc tcgcataaca acaattaaag Raaaaaactt aaaagtggga |
| 82861 | aggaagggag aatggagaag gtagaaattt aagtcgttta aagaatcttc cagacttttc |
| 82921 | acaatggttc ttcaataagt ctgccatttt aagaaagaac agaaggagat atagttagga |
| 82981 | aaaaggcagc cagtgttgta aggtgtggaa tgaggatgct gggcagacgc tccagagctg |
| 83041 | tacgagagac agagagagag agagagagag agagagagag agagagagag agagagagag |
| 83101 | tgtgtgtgtg tgtgtgtgtg tgtgtgtgtg tgtgtgtgcg cgcgcgcgcg cgcatgcgtg |
| 83161 | taagtggaaa gttgaacctc cttcctgtgt gctccaagag tctgcacaaa gagYaaatca |
| 83221 | cctgtcttac agggccctgg gccttcctaa cccttctttc tcccccgggg ttggaagccc |
| 83281 | acagacccaa agggctgagt catagtgtgc ggaggtgcct ggcccctggc agaaggcaac |
| 83341 | agggctggca aagagcccag gctttcacaa cggtcgggtg cccgtgtgct ccaagtcggg |
| 83401 | gaagtcacta gcccaggaat ttgcatatgt gagcgagaag caccctttgc tcctgcccct |
| 83461 | cgtgtatccc caagtgactc caggRtacct aasggatctg aacaggttct gtgcctctca |
| 83521 | catggtagca agtgacagga cacaaagagg gcagcaggtc aagcccgggg tcctgcccgt |
| 83581 | ccactcacca tcgcattggc atggctgctg ctctctggtg aattctgctc ctcaggagtg |
| 83641 | accacttcaa attcagagga ggtgccctgt gcagaaagga agttaggtgc tgcccgagag |
| 83701 | aaaaacagct cacccctcct ctgcggccct gtggctgaga gcagcaaggg ggacaaaatc |
| 83761 | tcttcccatt ttgagtacac agggaccgtt acatatcatc tcacatRaga tcacaaagca |
| 83821 | ggattctcga caagcctgtc atagccctct gcataatgtg aggtcatatc ccctcgatgg |
| 83881 | ccaatcctct tttgtagaag ggagatRtgg gactagctga ccttgaacca gcagcactgt |
| 83941 | aggattgcat tttttaaggc cgtgtacttt ttaaatgctt tcatgagctc cattatttct |
| 84001 | cagggtgacc catggagtgg gtcagaaggt tatatcctct ttggaaagat gaggaaacta |
| 84061 | cagtatacag ttggttaatg caaaagcagg gattgaaccc aagactgcag atccagcatt |
| 84121 | cctgccacgg ccccagagct gtctcttagg cccagacgtc tctgatcggt ttcccagaac |
| 84181 | acagatggca gctgttacgg ccaccaccaa gcatgYcctg tgctggcctt cccaagccag |
| 84241 | tcctggagat cccagaggag tgaactgatc tgagaaaagt cccagagatg attcaccaaa |
| 84301 | tttggagact atttcaggat tcaaccaaat ccacggtggc caagaaatcc cagatttttt |
| 84361 | cacatctttc cgtcattcct agtagaatta ctggtcattc aaccaaccaa gaagccaatg |
| 84421 | gcccacctga accagccatt agctctggga tctgggattt ccatgtcccg ttaaacctgg |
| 84481 | tctgcagcct cccttcatcc cagaaagggg caggatagat gagaggagtc agtgctcagc |
| 84541 | ttccagctga ccctcatggc caccaagaac tcacctctgg ctcttggccc tgccctagaa |
| 84601 | agtctccctc ctccatctac attttcccca ttacccgtgt aacctcagaa caggtYcttc |
| 84661 | tttccctgca cctgatctgt aggataagga tgctgaacta tgcaatccct tgtaggatac |
| 84721 | caagcaaaac ttctccagcc aaatctgtag attttttttt ttttttatga gagggtctga |
| 84781 | ctctgtcacc caggctggag tgtggtggca tcaacatggc tcactgcagc cttgacctcc |
| 84841 | tgggctcaag cgacccttct gcctcagcca gcctcccaag tagctggaac cacagacata |
| 84901 | caccatcaca cctgactact ttttttctta gagagatgga gtctcactat cctgcccagg |
| 84961 | ctggtctcaa actcctgggt tcaagcaatc ctcctgcctc agcctcccca agtgctggga |
| 85021 | ttataggcat gagccactgc gcccagcctg tagaagatag tttctgagcc ctctttgaga |
| 85081 | atgtgagctc catgtcacat ctgtctgttt tcctagcact gtgcacactc agtgatactt |
| 85141 | aacagtatac aacttagtaa gtgagaagaa ttccttgtac ataccagggt cttcctggta |
| 85201 | agttttaact atgaccttca tttcaaaatg gggaggctga ggccccagag agtttgcgat |
| 85261 | ggacttgccc aatatcaccc agcgagacgg aacacagttt cttgacctca accctctttc |
| 85321 | ttcatgttct tgtatctgtc agtaggactt gaggtccatc caggcaacct ccacccatga |
| 85381 | ctccaaataa aacttacact ggatggaggc ttctggactg gtgctggctt gtcactgggg |
| 85441 | catgcagRgg ctgtgggaga tgctgtgaca tttgagtcct ttcctggaga atcaagaaag |
| 85501 | cacagatgaa ctgactggga aggggagaag cccaggtacc accctctcaa ggacagccct |
| 85561 | tgacaaaagg gttctcagac aggattcccc actcgagtgt gggagaatgg gaggtggtct |
| 85621 | catcagggcc aggtagtctg agaaaatggc ctgccctgga gtgacggggc agagcctgag |
| 85681 | cagagagacc atgctccctg ggcttactgg gaaaatccca agttggctgc tgctccttgc |
| 85741 | tgccctgaac aggcctcaat gataaagaca atgatttaca atttgaaaag tctttatgta |
| 85801 | tctattatcc cagccattct cataaaagcc ccatatcccc attttaaagg tcaggacact |
| 85861 | gaggcttggg aaggtcatca Mcttgcccac agccacatag ccagcaactg caaactcagg |
| 85921 | actgagactt ggccctccct ccctgacttc ctgcagtcct tgctgcaggg agctccttga |
| 85981 | aggtagcttc atttctcact ctgagagtgg acctggcacc aatcaggaac tcaggaacat |
| 86041 | tgctgaatag acaagcagag gctggaaatg cccactgact gcagcacagt ggactctgag |
| 86101 | accatcactt tcctccattt gtccattcag caaatgcaac caccagccaa tagaaggctg |
| 86161 | tcacattggc ctgggccaga taccatacag tagagctgca gcaggaggca tctgagtcca |
| 86221 | gctgaggtgc ggatcatttc catcctggtc ccagacctta ccctggactt ggagacatgc |
| 86281 | cagagtaatg cacactctgt acgcatggtg atgcctctac catacatggg acttcaaccc |
| 86341 | cgagccacag tcaccctgtc ctttaatggg cagcacacgt aaccttacat ctgaaatacg |
| 86401 | ctgcagcagg ctaacaggca agcccagctt cttccctggg cctcagcttc cctaattgta |
| 86461 | aaatggacgc gcagggcacg accagggagc ttccaactca tatgccagct ccaagtgaca |
| 86521 | gggagtagct gcttggagYg cgatgcctgg cacacagtag ctgctcatta aatattaaat |
| 86581 | atgctgataa agaccccaag gccacaggac tgcaatgtag tcaactgttg tatctattac |
| 86641 | tcatgtctgc tggggcctca ggagtgctga gtcactggct atttttaaca agattgtttt |
| 86701 | gaagtccctt ccaaatctga ccttctgggg gatgtggcag ccaaaacatg aatggaaggg |
| 86761 | tagcctgtga cctaaggata aacgagagaa tgtggRtttt ggcataagaa gggagttcac |
| 86821 | tgtgaaggat ttgggcagtt tggggtacag ggagagtcag aggtacccag actcctctta |
| 86881 | tacctgtgag ctcagccagg gggtcgaagg agcccaagga gggagaaggt ggtgggagca |
| 86941 | gctcgttgtc cttcactagc tcctctgcct tctgccggag cctggtcgct tccatctggg |
| 87001 | actcttccaa aagctcccct agagttattg gggaagagga agcaaaagca tttactYggc |
| 87061 | tcagtgtgct gcttctcccc gtcccaggcc cctaaccgtg ctgccgcctg gcttctgagg |
| 87121 | ctccaggccc tggacttcac tcccaccgtt gctctgtggg ccaagtggga caaactccat |
| 87181 | gctggtccac cataagaaac aggctagagc aaggacgagg gcccagcaat cgggggacac |
| 87241 | aggagcggaa ggaatctatg agaaactcct cggctccccc aacccccagc attctctttc |
| 87301 | tgccccactc ccttcacacc cagccagggc actccacaga aagccagggg ctcccccacc |
| 87361 | ctacgggcta cccacagcct gagccaccag ggcaaagggc tgcctgcagg gcggagacct |
| 87421 | tggataattc caaccagccc tctaggcctc cattttcctt ctcctacaag tggagatggg |
| 87481 | gaaaccactc ctccctcccc agtcggccat cccaagcaag gatctgccaa gcaaggagaa |
| 87541 | agcattttaa aaatcagggg gctatgctcc cctctaaaac atgagactag agaagggcac |
| 87601 | ggcaaggcaa aggaagagtt tcaggagtgt ggaagaaaga gagccccctc tggatgggga |
| 87661 | aatcaatgaa agccttgtct ggaggagaag ggggcacagc aactgggtgc tgatgcacag |
| 87721 | ggcccgtcgg tcgtgtggag ggaggtgggg ttgttctaaa gtggggatgg cttgagcaag |
| 87781 | agccaggaga agagaactga gggacctacc acctccttgc ttcaagccaa gctctgctcc |
| 87841 | ctgctccaac acctaggaac gcgtgcccca gttgcctggt catgctggct ctccccatct |
| 87901 | ctcgtgcccc agaaagagga gRccactcta gttccatggc cattaactgg gccttccagc |
| 87961 | cccctttccc ttagcccacg cctccctctt ggacctgagt cctgtcatcc tggtttccgg |
| 88021 | gtgctgagga atcagggttg ggaatactgt caccatgcta catggtgcat agagacagct |
| 88081 | gtgaggcagg agccagcRct gggccaggag ggacagggga tgacttgggc agaggcatat |
| 88141 | gccagcttca ttctccactg ctagtagagg gactggcatc acagtctgca gggaggggcg |
| 88201 | ctcgcaggga ggggacaggg tctgctttac ctaacatctt tatcccttgc attttttcct |
| 88261 | tcagccggga attctccttc actaggcgct caaaagctgc ggatgcctct cctgagggca |
| 88321 | cgctgccccc agggtcgtag atccggtacg gtcctctccc ttccatgagg gtagctcagc |
| 88381 | ccctgccgtg gtgcccgcct ggctgtaagg acaacagcag catatcagca ggctggccag |
| 88441 | gccatggggg catcctttgc agagaagctc tagtctgtca atgccccaga aggcagtccc |
| 88501 | ccactttaag ctggtctgac catattatag taaagcagga cagtcacctc cttttatctg |
| 88561 | gacgctctgc ctctattaat acaaccttag aatggcatta gtttctctta gcagcctcaa |
| 88621 | tgcactgttg gcttgtttgg aacaggagtc caaataaaca gtagggtgca atgtgggata |
| 88681 | caagaaagaa cctggacttg gaaaaaaaaa aatctgagtt catgtcctgt ctgtgaggtc |
| 88741 | cagaagaaca ggaatcccat atgttttacc catcattgca tcctcagagc ctaccacagt |
| 88801 | attagctatg aattttgccc aataaacact tactcaatta atggtctagg cattaattta |
| 88861 | ctatgggatt atgggcagtc ccttcccctc tctgagggag ggaaatgaaa gtcttaagtt |
| 88921 | aatttagtaa tctttaaagt gaaatgcttg taccctaagg gataagcaag tcaacccagt |
| 88981 | ccaaagttcc atttatatgt gtatcatctt ctttaaaaaa agaaaagaaa aaaacaccct |
| 89041 | gactaatatt taatacactg tcaccctcct ccgtgagtct catatcatat atggtctgtc |
| 89101 | ccttgcagtt ctaaggaaca gaagaatttt tcatcaaacc actgtctatt tgagcaccaa |
| 89161 | ggtttttttt tagtaatctg ttcagtttca tctgctttat gtcactgaaa ccagttggaa |
| 89221 | aggtgatttt agaatcctaa ctctgtggct tagtagagaa gctctctgtc cattcactca |
| 89281 | tccattcaac aattacttat tgagcatcga ctccgtgcKa ggcaccagtc tgggtgctga |
| 89341 | ggaattatca gcaaataaaa cagacaaaaa tccttcatgg agcttatagt ctaggggtga |
| 89401 | aagcagagga ggatggtggg gaacacaata tttcaggtaa tcaaaaagtc tatgcacaaa |
| 89461 | aggccccaag cataaggagc tattttagcc aagacctgaa agaggtgagg gaactagcca |
| 89521 | tgaagacatc tgaaggaaga acattctttg cagagagaac agtaagggca gaggccctaa |
| 89581 | ggctgaaaca ccgagccagc ctccagccct ccaaatagct ctccagcatg aaagggccaa |
| 89641 | ggccttcact ggggacctca gaagggtttg ggggctcRgc accttcctcc caaggtcacc |
| 89701 | acccccaaga caaaaactgt ttcatcagga atcctcaaag accctcccaa gtccacacac |
| 89761 | catgctccgt gggtccttgg cgctgccagg tgactacgac cataccaccc tgctcccaga |
| 89821 | atgtaaatga aagatcagag tgagaaagga ttaacagcaa caccaccatg cttgaatcgc |
| 89881 | ctccttgtca ggcactgcat taaatgtttc agatatacaa tcttggagga gctgcacagt |
| 89941 | aactctaaca tgcatactaa tctcatctgc attttacaag ggagaaactg aggctcaggg |
| 90001 | cggttaagta actcagccac gatgaMccgg ccRcaataag agccaagatg caaagtcagc |
| 90061 | cctgcctgct gtgactctga cccccaccat actcacacag ccaggacaca gagScagagg |
| 90121 | ggcagacagg gagttcaaat ctctttgtag ggcagcacca tgctatcagg tcacctctgg |
| 90181 | gcagtttccc ttgccctgca gcataagaac caataaggac ttgtccaaga gcgtccatag |
| 90241 | gatggaatgg gccagaaaga aaaacaaagt tctgatgaga aggacccctt ctcccaaaga |
| 90301 | ctgacagata caagatgaat acaccRtgtg ggaggcaccc acgccctgct gagcctgcga |
| 90361 | ggcaaaggac agctacccac actcccatca caagtcatca cccggcttag gggtgacttg |
| 90421 | tttttaacct gaaaggtcag tgttctacag catagcacaa agYgcagatg tttccaccga |
| 90481 | actaagaaac agtgtggggg ctgcacttag cactggaact ggcacatagt aaagtactca |
| 90541 | aaaatgtYgg cagacattgg gggtccttcc cctctgcttg cctctgtcct cacgaggctt |
| 90601 | gccacctggt acagcatgtg tctgactggt gcgggcattg cccatctggc tgggaacttc |
| 90661 | ctgaggcagg agcgtacttt gcacatcttt gtattcctgt cgggagcaca ggagggtggg |
| 90721 | ccttccttga gagctgcttg gagttcaaga acagtgaaac agagggctac aaggggcctg |
| 90781 | gagccacctt gcatgacaaR ggcagcagtg tcctggttct tgtccaccat tatgcatKca |
| 90841 | ccctaaatgg aactcacagt caacaccaca tgaaggcatg gggaatttct tactcaatgt |
| 90901 | ctgccttgtc ctgtagatta gaggctgcat gaggacaggg agcaagtcca tcctgtgtgc |
| 90961 | cagggtatct tcagagtggc ccagagtagg gcctcggtaa accttgaatt cagagaagtc |
| 91021 | agactgaagg gaacaagccc ttgaccccga ccccgcctcc tgcaaggcca tgtccaacat |
| 91081 | cccagagaaa gcctaaccct gacccactga ccagacgcac ttggacgccc agacacttct |
| 91141 | agaatccagg ctgggccagc catgctccct cagagaggcc cagatgtaag gcgaagggac |
| 91201 | aaagcaggat gcaggatgtg ggaactgaaa cccaccccac gtcctccaaa acacgcaaca |
| 91261 | ctcagtttct cttggcgctg gggagtcaac gggaaagggg ttcatgggaa acaaaaagtg |
| 91321 | ggcagacaga gctatgctcc cctactttag cctcaggggg cagagcttgg ggagaaagaa |
| 91381 | aggcagtggg cagaggagaS gcaggagaaa tatcctattg tgggaaaacc ctctctggag |
| 91441 | atcagaggag ccacccctgg agggcctgga cttctggagg aaagaaagac aaagagggaa |
| 91501 | acagggaatt tccaagttct gctgacctca tgcccagatg gtcagcggca gtccctggat |
| 91561 | gaccactggg cagacgggaa ctctccctct gatcaatgag gtttttataa cttctcccag |
| 91621 | agagaggact cattctcagg atgacagagc tggaggggac tctccaaggg caatgaggcg |
| 91681 | aatcctgcat tatcaggtgg gagagagatg cacccagaaa cactcaatgg atgaggggct |
| 91741 | gcattcgaac atgacgatgg catgcactcc cctctgctgt ccacaaacca cgaggatgtt |
| 91801 | ttcaaagggg aaaaggaagc actgaccact cccctccatg tggcagtatc tggagttcag |
| 91861 | agcccaggag tcctcgggca tgagctcatc tgattctcac tcacggcaca ggcagtgcag |
| 91921 | caaggcaagg ccctgagcag ggaaggccaa ggtcacaaag gagtcaggat ggagctggga |
| 91981 | ccagaagatc cctgctctcc ctccaggctg cccacagccc atcctccatt tcccttcctg |
| 92041 | cccagcaatc ccatggcaca ccacaggccc ccaccacatc ttctcRgagt ctctttccac |
| 92101 | ctggcctggt tccacaaact acaaatcagc aggtgctcca ccagcagtgg gactccagcc |
| 92161 | ccgcttgccc aaaccagaaa cagctggtgg tatagaagca gccagcgcag actttcttcc |
| 92221 | aaaacaagac ctcagccagc ggggcctcca cagcctgccc cagaggggcc ctggggctgc |
| 92281 | ccgctggaac cagaaaggcc cagtttgggg gcagaaaggg gcccagacag acggcaggtc |
| 92341 | aggcaacaac cacagaccgt gaagatggaa gtgatgctgc tgaaaccgaa ggagccaccc |
| 92401 | actagcaggc aagcacttgt gggtggcagg gaggcagtag tccccagggc tcaactctca |
| 92461 | gccttacccc agaaagagag gggtatgata aagactacat tcagaattaa atttacattc |
| 92521 | tagcttttgc tctgaaatgc tttggtctgt cagattatct tcccattagc agtgttctgg |
| 92581 | tggctgggta ggggggtggt cccagacccc ccaaatgata ttcacttgca tagccactaa |
| 92641 | catttgcaaa atacttcata gtgtcccaag cattgttttt ccatctgatt atcacaacag |
| 92701 | ccctgggaag aaggcagggc tgatacctgc ctgatggata aggaaactga agtccagctt |
| 92761 | ggggacttaa tcagcccaat ttaatgcctt tggtcactgg ctgcatcctg gggccagcta |
| 92821 | tccctgcaac cctggagcag gtgatgccct ccctggccca gagggaaaag tgtaagcaaa |
| 92881 | tctctggtac agggaggtgg aaggtcatcg aggccaacat ctacctcccc agcagaggtg |
| 92941 | agggctgcca gggatgctgg caggtgggct ggcagagggg gtatagggaa ggggtctcca |
| 93001 | ggaaagacgg cacagaacag aacgtcagag aggtctattc tagtgtctac tctgctgtgt |
| 93061 | atggaaccat gggctcattc cctcacatgc aaggggagga gcatgggcca cacagaaacc |
| 93121 | gggtgatggc taaagctggc ctcaggatca agaagaccca agtctcagga gctagcagca |
| 93181 | agctgaggaa agagagagag ccagcaccat ggaaacatcg ctgccttgga ggcaggaaga |
| 93241 | aaggtccaca cagggaaagt gctcaaggcc aaccttgcga acacgaggcc tgagaggggg |
| 93301 | cctcacctgc actagcctca gctctgtcca ccctgtgggc tgtgaaaccc tggagcagcc |
| 93361 | actcaccttt cctgagcctc aggtgcctca tctgtaaagc aggagtaata atagaaccta |
| 93421 | cctgatagaa gatcaaagaa attaaatgaa acaatatgtg tatagttgga agggaattct |
| 93481 | cactttctac tttaggcaat acttcctgat tatctgattt aacaagaaac acatctttgt |
| 93541 | tttataataa gatttccaaa ataataagag tatacagtaa ctagctcagc atttgacaca |
| 93601 | cagcaggtgc ttaataaaag gctgaggcaa ccccacaact gtgcccagct tatctaaggg |
| 93661 | ccaaggcttt ccccatttgt tctctccttt aatgggattt taggctcttc cgtcagctca |
| 93721 | gtaagctagg ttctggcctc cacttattct ctagtgacct gcatatcacc atttaactgt |
| 93781 | ggttaagcag ggtgcctgga cacaccatag ctagtgaaca tgtagctata agaagccctt |
| 93841 | gaaccacgat gccacactca ccaacaactg ggaatctgag cctcatttcc tctgctgtaa |
| 93901 | agggcaatat cctgcaattc cacccaagga tgaaaggaag tgagaYgcca tgatatcaca |
| 93961 | ttgcagacat aaacaaaaaa ctgtccacat atttgtgtta tgatgacctc cagtcctccc |
| 94021 | caaccaattt ccaggctggg gaaactgcag cctcaggtcc atccatcaaa ggccgggttg |
| 94081 | gatttttcag gcagtgaaac tactctgttc aatactgtaa tggtggacac ctgccattcc |
| 94141 | acatttgtcc aaacccatag aacatacacc accaagaggg aacactgatg taaaccatgg |
| 94201 | actccgggtg acagtggtgt caatgtagat tcatcaactg taaaaaatct accactctgg |
| 94261 | tggaggatgt tgataatggg ggaagctatg cctgttaggg gtgggggggg cgcagtatat |
| 94321 | gtaaaatctc tgtaccttct tctcaatttt gctgtgaacc taaaactgct ctataaaaaa |
| 94381 | taaggtcttt aatttaaaag agaaaaggac caggctgggc tctcctgatg gctgtcaggt |
| 94441 | tcacacatga gtgaggacac agcacatact tgagacagtg tgtattcaag gaccgcaccc |
| 94501 | tggcatcctc accaacaagg agcccagact taactcctcc atccttgcaa tcaactgagc |
| 94561 | aacaatgagg ctgcagacac agagtctcat atagtaacag ctggggcgcc agaactgtgg |
| 94621 | gatctagtca aggtacacta gggcgaacat cttaaccctc actaggcctc agttacctaa |
| 94681 | aaagagggag ctgcaaaaat agtaataaca tggggggttg tgcgggataa tcattaaggc |
| 94741 | cccttccagt tctaacattt caggatctga aatttattag cactactttc tttaaccttc |
| 94801 | taaccttaag aaggctccaa tccccagctc caatcccttc taaggcccag gtggatttcc |
| 94861 | ctaacccatc agtcctccca taagagcttt cataggtgct atcccctccc cgagggcagt |
| 94921 | cagagaccct cagctgacat ccgcagccct gtgccaggtc ctcccctcct gcctaacttg |
| 94981 | taccaggctc tggccaagcc tgatctgtgt tcctcaacat ggcacacatc ttcccatgtc |
| 95041 | cttcatcctc ccctcccgag tcacccacaa agaaggcccc actgtctcca ctcagcctcc |
| 95101 | gaggcccaga ttacacacca cccgctaaac acctgagcca gaattcacac tgcaaaagag |
| 95161 | gactggagag cacctaacta agctggagag agggtgacag ttcgttaggc gctaccgtat |
| 95221 | gccaggtgct gggccgcatc atgacgcaca tgacctcatt ttcttcttgc cacacagata |
| 95281 | tggaaattat catccacact ttccagcaag gaaaccagtc gacgcagcta catggatgag |
| 95341 | gaagcagact cagagaagtY aagtcatttg cctgagaata cacagctggt tagtggtaga |
| 95401 | acaaataatg cagcctcaat ctgtcagatt ccaacatcag tgccctttcc actgctctac |
| 95461 | actgcctgga gaggcggcag gctgaagctc agaggtggga aaccagacct actttccagt |
| 95521 | tctccagaac gtgccccaag ttcctagccc ctgcctttat atgtctctag ctttatatgc |
| 95581 | aaccaggtgg caatctgccc cacatcacct gcagtcaaca gggtttagaa tctcaggctg |
| 95641 | gaagggagct cagaggacat tccatcctgt gcttacccag tcctctgagg agcccaggga |
| 95701 | ctccagctgg ccaactttag caatccagat ctcaccaact tcctccccaa aacaattcct |
| 95761 | ggggcagcca gcactggcta cagttaggct gctcccagtt ctgtttccac tggcccttct |
| 95821 | ctcccctctg tggtcccctg gaataaggaa caagatgccc atcttcagca tgacagccag |
| 95881 | ccctgaggac atttggaacc tgcagccttc tctatactgt tccacatagg gactgccccc |
| 95941 | cctccagtcc cccaccaacc ctctacccca cactatctct agttggttct agcactggac |
| 96001 | ccaacattcc aggcatggtt tgcctgacca aatgcaggct ttcacctcca cccttttagg |
| 96061 | tagtatattc ctattgaggg agcctgggta tacatttgct tttcttacag ctgagtcacc |
| 96121 | tactgaagaa tgtcctttct caatgacaac aacctgcatg tatgcctaac tggtgagaac |
| 96181 | aaagttctca tgtagaaacg tgtgcttgag ggctgggtgc ggtggctcat gcctgtaatt |
| 96241 | ccagcacttt gggaggccga ggtgggcgga tcacctgagg tcaggagttc gagatcagcc |
| 96301 | tggccaacat ggcaaaaccc agtctctact aaaaatacaa aaattagcca ggtgtggtgg |
| 96361 | cgggtgcctg tagtcccagc tactggggag gctgaggtag gagaatcgct tgaacttggg |
| 96421 | aggtggagat tgcagtaagc cgagatcacg ccacagcact ccagcctggg agacagagtg |
| 96481 | ggactccatc tcaaaagaaa aaaaaaaaaa aaaaggggtg tttgaggagg tgtgagttac |
| 96541 | ctaagggggc agaagtaact gattgattca gtaatMccct atctaggaat ctagagatct |
| 96601 | ttgcatcagt acacagaagc tggacaaaaa tatgcactgc cacatgcttt gtaatagaca |
| 96661 | tttttgctat tcttgaatgt ccatcaagaa gggactggtt aaacaaacca ccattcattc |
| 96721 | Ratggaatac tatacagcca tcaaaaagaa tggggtagat tgcttggcaa tgatacagaa |
| 96781 | agatgcccat aaaatacaaa gcaaagtgca gatttatatg tgtaacagga tgctattttt |
| 96841 | ttcaaaaaca cattgtgtgt gtgtgtgtat acatacggaa tcttaaatgt gcatagaaaa |
| 96901 | aggcctggaa gcccagtgct ttgggaggcc aaggtgggag gattgcttga ggccaggggt |
| 96961 | tcaagaccag cctgggcaaa aagcaagaat agattctcta ttaaaaaaaa acttttttac |
| 97021 | attagcagag catggtggca catgcctgga gtcccagcta ctcggaaagt tgaggtggga |
| 97081 | ggatcacttg agcccagcag ttcaggctac agtgagctat gatcatgcca ctgaactcca |
| 97141 | gcctgagtga cagactaata ctctgtctct taaaaaaaag aaaagaagaa aagaaaaaag |
| 97201 | tctcaaagga tacataccaa actgctacta gtagactgct ctacagaagg acctcggtaa |
| 97261 | ggaactaaaa ccaaaagaaa cttttatttt acctatgcta ttttaactct ttacatggga |
| 97321 | aatctagtcc tgttcttata caattataaa attagttttt aaatacagta gggacagagg |
| 97381 | aaggggaaag gaaggagaga gaagacaact gtcatttttt acattatatc ttttgtactg |
| 97441 | cttgagtttt ggggggtttt tccccaataa tcatgtgcta tttggtaatt ttttttaaag |
| 97501 | ggaaatttta aaatattttt ctaaaaaatt taagtgagct gagtgcagtg gtgcatgcct |
| 97561 | gtagtcccag ctactccaga gacagacgca ggaggatggc ctgaaaccag agtttatcta |
| 97621 | accctgtaac tcccctgcct ccaagaggta agatgccaat tttggggaat tcctcttata |
| 97681 | caaaatatgg tggaaagagg gtttcacaga ttcaaatcct ggctatgatc ccttctcgaa |
| 97741 | tgaccctggg taggcctcac tttccugtt tctccctatg gaaatgttat gaggaccaag |
| 97801 | taggaaccat agagttctct gtaaacctta aaatgctacc cagacaggag cagtaatggc |
| 97861 | tgccaaggag ctaggaagga aaaggggctg gacaggggct gaggtactca gatgaaagcc |
| 97921 | aaagatgcct tgtgttaaca acaaaaagct gaaagctacc taaaatgaag agaaaaatga |
| 97981 | ataaatacat tgtggcaatt tcctatcagg aaatactata cagcagtgaa aaaagaatga |
| 98041 | gccacagctg gagatacgaa catgaatgaa tctgggtctc actctgttgc ccaggctgga |
| 98101 | gtgcagtggc atgatctcag ttcactgcaa cttccacctc ccagcccaag tcatcctccc |
| 98161 | acctLagcct ctcaagtagc tggaactaca ggcatgcgcc accacaccca gctaattttt |
| 98221 | gtattgtttg cagagatggg ttttggccat gttgcccaag ctggtctcaa actcctgggc |
| 98281 | tcaagagatc cacctgcctg ctctgcctcc caaagWgcca gtaaggcatg agtcaccacg |
| 98341 | ctcagcctaa ataacatttt taaacataaa aaaatactat gtattattta gggatgcaca |
| 98401 | cattaaaaaa aaaactttaa agaaatgcaa gaaaaaaacc ccactaaatt cagaacactt |
| 98461 | gtttcttgtt ggtggctgat gaaggagaaa tttcaaStga ttggaaatgt gttatttctt |
| 98521 | aaaccagatg agtgagcatg taggtgcctg cgtgttaccc tcggtatctg agagactcct |
| 98581 | tcaatttttc ttttttcttt ttactgtatt gtttgctttt tttctgcttc aacttttatt |
| 98641 | ttagattcgg ggggtacatg tgcaggtttg ctacctgggt atactgcgtg atttgggtag |
| 98701 | gggtgatccc atcacctggg tactgagcat agttcccaac agtttttcaa ctctgcctcc |
| 98761 | ctccctcccc actctagcag tccccagtgt ctactgttgc catctttatg tccatgagga |
| 98821 | cctgatattt agctccactt ataagtgaga aaatgcagca tttggttttc tgttcctgtg |
| 98881 | ttaatgtgct taggacaata ttttctaaaa gtctatgttg ccagtttcct gaggaccaga |
| 98941 | tcacgcagga gttgcacctg cagagacaga agtgggctgg agagggacca gggctcctaa |
| 99001 | gtctgctgct gaagctgact atagcgaagg caaaggacaa gtggcctgaa ggccaacaga |
| 99061 | gagcctggcc aatgctctgc ccagtgggtg gagactgagc caaaggccct tgactcatag |
| 99121 | ggcagtccca tacctgccct ggcctctcag catgactcct tggtgacaca actcccacag |
| 99181 | cacccacaca cctacaccca cctaccccac acacacaccc ctgcctgggc tgcccggttt |
| 99241 | gtccactgtg taggtgctca aggacgcaga gctcctgcct ctcaaggaac agcctcaggg |
| 99301 | tgaggtccct gggagagaag agttcagctc tgcccagagc agccctcaga caaacagcca |
| 99361 | gctgctgctc accagtcatc cRttccaatc tgaagagtga ctgtcctggg ccagtcatgg |
| 99421 | gaaaatcatc aagaacttcc cRcaatggtc atggtggccg ccaaggtctt tctctggggg |
| 99481 | ttgggagctg tgctccccca caaaacaagg ggacccagct gccctgtgcc ttcctgtggc |
| 99541 | aactctctgg aggatgcctg gataccctcc ctacagacgg ccagggatag gaggggcagg |
| 99601 | cactgcaggc atgtgggggc atagcagcaa gaatctagga gggcaggcac agcaaggcct |
| 99661 | ggcccagagg gaaaccagga gctgccagag ccaaagagag ggtgacccaa tcattggttg |
| 99721 | ttatagagtt tttaagactt ggaagagaat gccctgagat gccaNagagt gaaacatttt |
| 99781 | cattctaaag ctgggaaacc aaagtcggca aaggcgaaca gacgtgccca cagccacatg |
| 99841 | ggacagcagt ggcacagaag aaatgcacac ctcgtcctct ggtggccact gtgcactctc |
| 99901 | ttaccacacc atgctactgc tcaacctctc cccctccctc acagtggtca ggtaagcaat |
| 99961 | gagggaaaat gatggaggtg agaaaggaag aacccgggct |

[0318] Following is a CETP coding nucleotide sequence (cDNA, SEQ ID NO: 6). >gi|4557442|ref|NM_{—}000078.1| Homo sapiens cholesteryl ester transfer protein, plasma (CETP), mRNA.

| | |
|---|---|
| 1 | gtgaatctct ggggccagga agaccctgct gcccggaaga |
| | gcctcatgtt ccgtgggggc |
| 61 | tgggcggaca tacatatacg ggctccaggc tgaacggctc |
| | gggccactta cacaccactg |
| 121 | cctgataacc atgctggctg ccacagtcct gaccctggcc |
| | ctgctgggca atgcccatgc |
| 181 | ctgctccaaa ggcacctcgc acgaggcagg catcgtgtgc |
| | cgcatcacca agcctgccct |
| 241 | cctggtgttg aaccacgaga ctgccaaggt gatccagacc |
| | gccttccagc gagccagcta |
| 301 | cccagatatc acgggcgaga aggccatgat gctccttggc |
| | caagtcaagt atgggttgca |
| 361 | caacatccag atcagccact tgtccatcgc cagcagccag |
| | gtggagctgg tggaagccaa |
| 421 | gtccattgat gtctccattc agaacgtgtc tgtggtcttc |
| | aaggggaccc tgaagtatgg |
| 481 | ctacaccact gcctggtggc tgggtattga tcagtccatt |
| | gacttcgaga tcgactctgc |
| 541 | cattgacctc cagatcaaca cacagctgac ctgtgactct |
| | ggtagagtgc ggaccgatgc |
| 601 | ccctgactgc tacctgtctt tccataagct gctcctgcat |
| | ctccaagggg agcgagagcc |
| 661 | tgggtggatc aagcagctgt tcacaaattt catctccttc |
| | accctgaagc tggtcctgaa |
| 721 | gggacagatc tgcaaagaga tcaacgtcat ctctaacatc |
| | atggccgatt ttgtccagac |
| 781 | aagggctgcc agcatccttt cagatggaga cattggggtg |
| | gacatttccc tgacaggtga |
| 841 | tcccgtcatc acagcctcct acctggagtc ccatcacaag |
| | ggtcatttca tctacaagaa |
| 901 | tgtctcagag gacctccccc tccccacctt ctcgcccaca |
| | ctgctggggg actcccgcat |
| 961 | gctgtacttc tggttctctg agcgagtctt ccactcgctg |
| | gccaaggtag ctttccagga |
| 1021 | tggccgcctc atgctcagcc tgatgggaga cgagttcaag |
| | gcagtgctgg agacctgggg |
| 1081 | cttcaacacc aaccaggaaa tcttccaaga ggttgtcggc |
| | ggcttcccca gccaggccca |
| 1141 | agtcaccgtc cactgcctca agatgcccaa gatctcctgc |
| | caaaacaagg gagtcgtggt |
| 1201 | caattcttca gtgatggtga aattcctctt tccacgccca |
| | gaccagcaac attctgtagc |
| 1261 | ttacacattt gaagaggata tcgtgactac cgtccaggcc |
| | tcctattcta agaaaaagct |
| 1321 | cttcttaagc ctcttggatt tccagattac accaaagact |
| | gtttccaact tgactgagag |
| 1381 | cagctccgag tccatccaga gcttcctgca gtcaatgatc |
| | accgctgtgg gcatccctga |
| 1441 | ggtcatgtct cggctcgagg tagtgtttac agccctcatg |
| | aacagcaaag gcgtgagcct |
| 1501 | cttcgacatc atcaaccctg agattatcac tcgagatggc |
| | ttcctgctgc tgcagatgga |
| 1561 | ctttggcttc cctgagcacc tgctggtgga tttcctccag |
| | agcttgagct agaagtctcc |
| 1621 | aaggaggtcg ggatggggct tgtagcagaa ggcaagcacc |
| | aggctcacag ctggaaccct |
| 1681 | ggtgtctcct ccagcgtggt ggaagttggg ttaggagtac |
| | ggagatggag attggctccc |
| 1741 | aactcctccc tatcctaaag gcccactggc attaaagtgc |
| | tgtatccaag |

CDS: 131-1612 base pairs
Signal peptide: 131-181 base pairs
Mature peptide: 182-1609 base pairs
PolyA signal: 1771-1776 base pairs

[0319] Following is a second PROL4 cDNA sequence (SEQ ID NO:7). >gi|6005801|ref|NM007244.1| Homo sapiens proline rich 4 (lacrimal) (PRR4), mRNA

| | |
|---|---|
| 1 | cagagcctcc ttcaagatgc tgctggtcct gctctcagtg |
| | tccttctgg ctctgagctc |
| 61 | agctcagagc acagataatg atgtgaacta tgaagacttt |
| | actttcacca taccagatgt |
| 121 | agaggactca agtcagagac cagatcaggg accccagaga |
| | cctcctcctg aaggactcct |
| 181 | acctagaccc cctggtgata gtggtaacca agatgatggt |
| | cctcagcaga gaccaccaaa |
| 241 | accaggaggc catcaccgcc atcctccccc acctcctttt |
| | caaaatcagc aacgaccacc |
| 301 | ccaacgagga caccgtcaac tctctctacc ccgatttcct |
| | tctgtcagcc tgcaggaagc |
| 361 | atcatcattc ttccggaggg acagaccagc aagacatccc |
| | caggagcaac cactctggta |
| 421 | atctagaatt cagtggcaga aaataaataa gaagataact |
| | tcattcagaa agccatgaca |
| 481 | ttgaaataat gtggtcataa ctctttc |

CDS: 17 . . . 421 base pairs
PolyA signal: 442 . . . 447 base pairs

[0320] Following is a GRID2 cDNA sequence (SEQ ID NO: 8). >gi|4557632|ref|NM_{—}001510.1| Homo sapiens glutamate receptor, ionotropic, delta 2 (GRID2), mRNA.

| | |
|---|---|
| 1 | atggaagttt tccccttgct cttggttttg tccgtctggt |
| | ggtctcgaac ctgggactcg |
| 61 | gcgaatgcgg attcgatcat tcacatcgga gcaatttttg |
| | atgaatctgc caaaaaggat |
| 121 | gatgaggtat ttcgcactgc ggttggtgac cttaaccaga |
| | atgaagagat cttacagact |
| 181 | gagaaaatca cattttcagt gacgtttgtt gatggcaaca |
| | accctttcca agcagttcaa |
| 241 | gaagcctgtg aacttatgaa tcaaggcatc ttggccctgg |
| | tcagctccat tggctgcacg |
| 301 | tcagcaggat ccctccagtc tttggcagac gccatgcata |
| | tcccccacct cttcattcag |
| 361 | cgctcaacag ctgggacccc aaggagtggc tgtggactca |
| | cccggagcaa caggaatgat |
| 421 | gactacactc tctcagttcg cccacctgtc tacttgcatg |
| | atgttatcct aagagtggtc |
| 481 | acagagtatg cctggcagaa attcattata ttctatgata |
| | gtgaatacga tatccgtgga |
| 541 | atacaggagt tcttggacaa agtctctcag cagggaatgg |
| | atgttgcact tcagaaggta |
| 601 | gaaaacaaca tcaataaaat gattaccact ctctttgaca |
| | ccatgagaat agaagaactg |
| 661 | aatcgctatc gagacactct taggcgagcg atccttgtta |
| | tgaatcctgc tacagccaaa |
| 721 | tccttcatta ctgaggttgt ggagactaat ttggttgctt |
| | ttgactgtca ctggatcatt |
| 781 | ataaatgagg aaataaacga tgtggacgta caggaacttg |
| | taagaaggtc aattggaagg |
| 841 | ttaacgatta ttcggcagac atttccaatt ccccagaaca |
| | taagtcagcg gtgtttccgt |
| 901 | ggcaaccatc gaatatcttc aacattgtgt gatccaaagg |
| | atccatttgc tcagaatatg |
| 961 | gagatttcca acctttacat atatgacacg gtgcttctgc |
| | ttgctaatgc ttttcataag |
| 1021 | aagctggagg accgaaagtg gcacagcatg gcaagtctgt |
| | catgtatcag aaagaactca |
| 1081 | aagccctggc agggtgggcg ctccatgttg gagaccatca |
| | agaagggtgg agttagtggg |
| 1141 | ttgactggag agctagaatt tggagaaaat ggaggcaatc |
| | ccaatgtcca ctttgaaatc |
| 1201 | cttggaacca actatggaga agagcttggc agaggtgttc |
| | gaaaacttgg gtgctggaat |
| 1261 | cctgtcacag gtctgaatgg gtcactgact gacaagaaat |
| | tggagaataa catgcgtgga |
| 1321 | gtggttctac gtgtagtaac tgttctggaa gaaccttttg |
| | tgatggtctc tgaaaatgtc |
| 1381 | ttgtgtaagc cgaagaaata ccagggcttc tccattgatg |
| | ttttggatgc cttatctaac |
| 1441 | tacctgggtt ttaactacga aatttacgta gcaccggatc |
| | acaaatacgg aagcccacaa |
| 1501 | gaagatggga catggaatgg cttggtagga gaacttgtct |
| | ttaagagagc cgacataggg |
| 1561 | atttctgctt taaccatcac tccagatcgt gaaaatgtgg |
| | tggactttac gacacgttac |
| 1621 | atggactact cagtgggggt actacttcga agggctgaaa |
| | agacagtgga tatgtttgcc |
| 1681 | tgtcttgcac catttgatct ctctctatgg gcttgcattg |
| | ctggcacagt ccttctggtg |
| 1741 | ggtctactgg tctacctctt gaactggctt aatcccccac |
| | gattacaaat gggatcaatg |
| 1801 | acgtctacta ctctctacaa ctccatgtgg tttgtgtatg |
| | gatcttttgt acaacaaggc |
| 1861 | ggggaagtcc cgtacacgac tctggctacc cgaatgatga |
| | tgggggcttg gtggctattt |
| 1921 | gctttgattg ttatctcatc ttacacggca aacctcgctg |
| | ctttcctcac tattacacgc |
| 1981 | attgaaagtt ccatccagtc tctccaggac ctttccaagc |
| | aaacagaaat cccttatggc |
| 2041 | acagtcctag actctgcggt atatgagcat gtccgcatga |
| | aaggactgaa tccttttgag |
| 2101 | agggacagca tgtattccca aatgtggcgg atgatcaacc |
| | gaagcaatgg atcggagaac |
| 2161 | aatgttctgg agtcccaggc aggcattcaa aaggtaaaat |
| | atggaaatta tgctttcgta |
| 2221 | tgggatgcag ctgtattgga atatgtggct atctatgacc |
| | cagattgttc cttttacacc |
| 2281 | attggaaata ctgttgctga tcggggatat ggaattgcat |
| | tacaacatgg cagtccttac |
| 2341 | cgagatgttt tttcacaaag gatcctggag cttcagcaga |
| | atggtgacat ggacatcctg |
| 2401 | aagcacaaat ggtggcctaa gaatggccag tgtgacctgt |
| | actcgtcagt ggacacaaag |
| 2461 | cagaaaggag gcgccctgga cataaagagc tttgcagggg |
| | tcttttgtat cctggctgct |
| 2521 | ggaattgtcc tctcctgctt catagccatg ctggagacgt |
| | ggtggaacaa gaggaaaggc |
| 2581 | tcccgggttc catcaaaaga ggatgacaag gaaattgacc |
| | tggagcacct ccatagacgt |
| 2641 | gtaaatagct tgtgcacaga tgacgacagc ccccataaac |
| | agttttccac ctcgtcaatt |
| 2701 | gatttgaccc ctctggacat tgacactttg ccaacacgac |
| | aagcactgga gcaaatcagt |
| 2761 | gatttcagga acactcatat taccacaaca acctttatcc |
| | cagagcagat ccagactctt |
| 2821 | agccgcacac tgtcagctaa agctgcttct ggtttcactt |
| | ttggcaacgt gcctgagcac |
| 2881 | cgaactggcc cttttaggca cagggcacct aatgggggct |
| | ttttcaggag tcctataaaa |
| 2941 | acaatgtcat ctattcctta tcaaccaact cctaccctgg |
| | ggctcaatct gggtaatgat |
| 3001 | ccagaccgag gcacctccat atga |

[0321] Following is a PDE4D cDNA sequence (SEQ ID NO: 9). >gi|4636198|ref|_{—}006203.3| Homo sapiens phosphodiesterase 4D, cAMP-specific (phosphodiesterase E3 dunce homolog, Drosophila) (PDE4D), mRNA.

| | |
|---|---|
| 1 | ggaattcatc tgtaaaaatc actacatgta acgtaggaga |
| | caagaaaaat attaatgaca |
| 61 | gaagatctgc gaacatgatg cacgtgaata attttccctt |
| | tagaaggcat tcctggatat |
| 121 | gttttgatgt ggacaatggc acatctgcgg gacggagtcc |
| | cttggatccc atgaccagcc |
| 181 | caggatccgg gctaattctc caagcaaatt ttgtccacag |
| | tcaacgacgg gagtccttcc |
| 241 | tgtatcgatc cgacagcgat tatgacctct ctccaaagtc |
| | tatgtcccgg aactcctcca |
| 301 | ttgccagtga tatacacgga gatgacttga ttgtgactcc |
| | atttgctcag gtcttggcca |
| 361 | gtctgcgaac tgtacgaaac aactttgctg cattaactaa |
| | tttgcaagat cgagcaccta |
| 421 | gcaaaagatc acccatgtgc aaccaaccat ccatcaacaa |
| | agccaccata acagaggagg |
| 481 | cctaccagaa actggccagc gagaccctgg aggagctgga |
| | ctggtgtctg gaccagctag |
| 541 | agaccctaca gaccaggcac tccgtcagtg agatggcctc |
| | caacaagttt aaaaggatgc |
| 601 | ttaatcggga gctcacccat ctctctgaaa tgagtcggtc |
| | tggaaatcaa gtgtcagagt |
| 661 | ttatatcaaa cacattctta gataagcaac atgaagtgga |
| | aattccttct ccaactcaga |
| 721 | aggaaaagga gaaaaagaaa agaccaatgt ctcagatcag |
| | tggagtcaag aaattgatgc |
| 781 | acagctctag tctgactaat tcaagtatcc caaggtttgg |
| | agttaaaact gaacaagaag |
| 841 | atgtccttgc caaggaacta gaagatgtga acaaatgggg |
| | tcttcatgtt ttcagaatag |
| 901 | cagagttgtc tggtaaccgg cccttgactg ttatcatgca |
| | caccattttt caggaacggg |
| 961 | atttattaaa aacatttaaa attccagtag atactttaat |
| | tacatatctt atgactctcg |
| 1021 | aagaccatta ccatgctgat gtggcctatc acaacaatat |
| | ccatgctgca gatgttgtcc |
| 1081 | agtctactca tgtgctatta tctacacctg ctttggaggc |
| | tgtgtttaca gatttggaga |
| 1141 | ttcttgcagc aatttttgcc agtgcaatac atgatgtaga |
| | tcatcctggt gtgtccaatc |
| 1201 | aatttctgat caatacaaac tctgaacttg ccttgatgta |
| | caatgattcc tcagtcttag |
| 1261 | agaaccatca tttggctgtg ggctttaaat tgcttcagga |
| | agaaaactgt gacattttcc |
| 1321 | agaatttgac caaaaaacaa agacaatctt taaggaaaat |
| | ggtcattgac atcgtacttg |
| 1381 | caacagatat gtcaaaacac atgaatctac tggctgattt |
| | gaagactatg gttgaaacta |
| 1441 | agaaagtgac aagctctgga gttcttcttc ttgataatta |
| | ttccgatagg attcaggttc |
| 1501 | ttcagaatat ggtgcactgt gcagatctga gcaacccaac |
| | aaagcctctc cagctgtacc |
| 1561 | gccagtggac ggaccggata atggaggagt tcttccgcca |
| | aggagaccga gagagggaac |
| 1621 | gtggcatgga gataagcccc atgtgtgaca agcacaatgc |
| | ttccgtggaa aaatcacagg |
| 1681 | tgggcttcat agactatatt gttcatcccc tctgggagac |
| | atgggcagac ctcgtccacc |
| 1741 | ctgacgccca ggatattttg gacactttgg aggacaatcg |
| | tgaatggtac cagagcacaa |
| 1801 | tccctcagag cccctctcct gcacctgatg acccagagga |
| | gggccggcag ggtcaaactg |
| 1861 | agaaattcca gtttgaacta actttagagg aagatggtga |
| | gtcagacacg gaaaaggaca |
| 1921 | gtggcagtca agtggaagaa gacactagct gcagtgactc |
| | caagactctt tgtactcaag |
| 1981 | actcagagtc tactgaaatt ccccttgatg aacaggttga |
| | agaggaggca gtaggggaag |
| 2041 | aagaggaaag ccagcctgaa gcctgtgtca tagatgatcg |
| | ttctcctgac acgtaacagt |
| 2101 | gcaaaaactt tcatgccttt ttttttttta agtagaaaaa |
| | ttgtttccaa agtgcatgtc |
| 2161 | acatgccaca accacggtca cacctcactg tcatctgcca |
| | ggacgtttgt tgaacaaaac |
| 2221 | tgaccttgac tactcagtcc agcgctcagg aatatcgtaa |
| | ccagtttttt cacctccatg |
| 2281 | tcatccgagc aaggtggaca tcttcacgaa cagcgttttt |
| | aacaagattt cagcttggta |
| 2341 | gagctgacaa agcagataaa atctactcca aattattttc |
| | aagagagtgt gactcatcag |
| 2401 | gcagcccaaa agtttattgg acttggggtt tctattcctt |
| | tttatttgtt tgcaatattt |
| 2461 | tcagaagaaa ggcattgcac agagtgaact taatggacga |
| | agcaacaaat atgtcaagaa |
| 2521 | caggacatag cacgaatctg ttaccagtag gaggaggatg |
| | agccacagaa attgcataat |
| 2581 | tttctaattt caagtcttcc tgatacatga ctgaatagtg |
| | tggttcagtg agctgcactg |
| 2641 | acctctacat tttgtatgat atgtaaaaca gattttttgt |
| | agagcttact tttattatta |
| 2701 | aatgtattga ggtattatat ttaaaaaaaa ctatgttcag |
| | aacttcatct gccactggtt |
| 2761 | atttttttct aaggagtaac ttgcaagttt tcagtacaaa |
| | tctgtgctac actggataaa |
| 2821 | aatctaattt atgaatttta cttgcacctt atagttcata |
| | gcaattaact gatttgtagt |
| 2881 | gattcattgt ttgttttata taccaatgac ttccatattt |
| | taaaagagaa aaacaacttt |
| 2941 | atgttgcagg aaaccctttt tgtaagtctt tattatttac |
| | tttgcatttt gtttcactct |
| 3001 | ttccagataa gcagagttgc tcttcaccag tgtttttctt |
| | catgtgcaaa gtgactattt |
| 3061 | gttctataat acttttatgt gtgttatatc aaatgtgtct |
| | taagcttcat gcaaactcag |
| 3121 | tcatcagttc gtgttgtctg aagcaagtgg gaaatatata |
| | aatacccagt agctaaaatg |
| 3181 | gtcagtcttt tttagatgtt ttcctactta gtatctccta |
| | ataacgtttt gctgtgtcac |
| 3241 | tagatgttca tttcacaagt gcatgtcttt ctaataatcc |
| | acacatttca tgctctaata |
| 3301 | atccacacat ttcatgctca tttttattgt ttttacagcc |
| | agttatagca agaaaaaggt |
| 3361 | ttttcccctt gtgctgcttt ataatttagc gtgtgtctga |
| | accttatcca tgtttgctag |
| 3421 | atgaggtctt gtcaaatata tcactaccat tgtcaccggt |
| | gaaaagaaac aggtagttaa |
| 3481 | gttagggtta acattcattt caaccacgag gttgtatatc |
| | atgactagct tttactcttg |
| 3541 | gtttacagag aaaagttaaa caaccaacta ggcagttttt |
| | aagaatatta acaatatatt |
| 3601 | aacaaacacc aatacaacta atcctatttg gttttaatga |
| | tttcaccatg ggattaagaa |
| 3661 | ctatatcagg aacatccctg agaaacggct ttaagtgtag |
| | caactactct tccttaatgg |
| 3721 | acagccacat aacgtgtagg aagtccttta tcacttatcc |
| | tcgatccata agcatatctt |
| 3781 | gcagagggga actacttctt taaacacatg gagggaaaga |
| | agatgatgcc actggcacca |
| 3841 | gagggttagt actgtgatgc atcctaaaat atttattata |
| | ttggtaaaaa ttctggttaa |
| 3901 | ataaaaaatt agagatcact cttggctgat ttcagcacca |
| | ggaactgtat tacagtttta |
| 3961 | gagattaatt cctagtgttt acctgattat agcagttggc |
| | atcatggggc atttaattct |
| 4021 | gactttatcc ccacgtcagc cttaataaag tcttctttac |
| | cttctctatg aagactttaa |
| 4081 | agcccaaata atcatttttc acattgatat tcaagaattg |
| | agatagatag aagccaaagt |
| 4141 | gggtatctga caagtggaaa atcaaacgtt taagaagaat |
| | tacaactctg aaaagcattt |
| 4201 | atatgtggaa cttctcaagg agcctcctgg ggactggaaa |
| | gtaagtcatc agccaggcaa |
| 4261 | atgactcatg ctgaagagag tccccatttc agtcccctga |
| | gatctagctg atgcttagat |
| 4321 | cctttgaaat aaaaattatg tctttataac tctgatcttt |
| | tacataaagc agaagaggaa |
| 4381 | tcaactagtt aattgcaagg tttctactct gtttcctctg |
| | taaagatcag atggtaatct |
| 4441 | ttcaaataag aaaaaaataa agacgtatgt ttgaccaagt |
| | agtttcacaa gaatatttgg |
| 4501 | gaacttgttt cttttaattt tatttgtccc tgagtgaagt |
| | ctagaaagaa aggtaaagag |
| 4561 | tctagagttt attcctcttt ccaaaacatt ctcattcctc |
| | tcctccctac acttagtatt |
| 4621 | tcccccacag agtgcctaga atcttaataa tgaataaaat |
| | aaaaagcagc aatatgtcat |
| 4681 | taacaaatcc agacctgaaa gggtaaaggg tttataactg |
| | cactaataaa gagaggctct |
| 4741 | ttttttttct tccagtttgt tggtttttaa tggtaccgtg |
| | ttgtaaagat acccactaat |
| 4801 | ggacaatcaa attgcagaaa aggctcaata tccaagagac |
| | agggactaat gcactgtaca |
| 4861 | atctgcttat ccttgccctt ctctcttgcc aaagtgtgct |
| | tcagaaatat atactgcttt |
| 4921 | aaaaaagaat aaaagaatat ccttttacaa gtggctttac |
| | atttcctaaa atgccataag |
| 4981 | aaaatgcaat atctgggtac tgtatgggga aaaaaatgtc |
| | caagtttgtg taaaaccagt |
| 5041 | gcatttcagc ttgcaagtta ctgaacacaa taatgctgtt |
| | ttaattttgt tttatatcag |
| 5101 | ttaaaattca caataatgta gatagaacaa attacagaca |
| | aggaaagaaa aaacttgaat |
| 5161 | gaaatggatt ttacagaaag ctttatgata atttttgaat |
| | gcattattta ttttttgtgc |
| 5221 | catgcatttt ttttctcacc aaatgacctt acctgtaata |
| | cagtcttgtt tgtctgttta |
| 5281 | caaccatgta tttattgcaa tgtacatact gtaatgttaa |
| | ttgtaaatta tctgttctta |
| 5341 | ttaaaacatc atcccatgat ggggtggtgt tgatatattt |
| | ggaaactctt ggtgagagaa |
| 5401 | tgaatggtgt gtatacatac tctgtacatt tttcttttct |
| | cctgtaatat agtcttgtca |
| 5461 | ccttagagct tgtttatgga agattcaaga aaactataaa |
| | atacttaaag atatataaat |
| 5521 | ttaaaaaaac atagctgcag gtctttggtc ccagggctgt |
| | gccttaactt taaccaatat |
| 5581 | tttcttctgt tttgctgcat ttgaaaggta acagtggagc |
| | tagggctggg cattttacat |
| 5641 | ccaggctttt aattgattag aattctgcca ataggtggat |
| | tttacaaaac cacagacaac |
| 5701 | ctctgaaaga ttctgagacc cttttgagac agaagctctt |
| | aagtacttct tgccagggag |
| 5761 | cagcactgca tgtgtgatgg ttgtttgcca tctgttgatc |
| | aggaactact tcagctactt |
| 5821 | gcatttgatt atttcctttt tttttttttt taactcggaa |
| | acacaactgg gggaat |

[0322] Following is a GPX3 cDNA sequence (SEQ ID NO: 10). >gi|6006000|ref|NM_{—}002084.2| Homo sapiens glutathione peroxidase 3 (plasma) (GPX3), mRNA.

| | |
|---|---|
| 1 | agccaaaaga ggaagggacc ggcctcccac gtccacaggg |
| | acctgacttc cacctctctg |
| 61 | cccagatttg cttatgtcac tgtcgccccg ggacggggag |
| | gtggggagct gagggcaagt |
| 121 | cgcgcccgcc cctgaaatcc cagccgccta gcgattggct |
| | gcaagggtct cggcttggcc |
| 181 | gcggattaat cacacccgag ggcttgaaag gtggctggga |
| | gcgccggaca cctcagacgg |
| 241 | acggtggcca gggatcaggc agcggctcag gcgaccctga |
| | gtgtgccccc accccgccat |
| 301 | ggcccggctg ctgcaggcgt cctgcctgct ttccctgctc |
| | ctggccggct tcgtctcgca |
| 361 | gagccgggga caagagaagt cgaagatgga ctgccatggt |
| | ggcataagtg gcaccattta |
| 421 | cgagtacgga gccctcacca ttgatgggga ggagtacatc |
| | cccttcaagc agtatgctgg |
| 481 | caaatacgtc ctctttgtca acgtggccag ctactgaggc |
| | ctgacgggcc agtacattga |
| 541 | actgaatgca ctacaggaag agcttgcacc attcggtctg |
| | gtcattctgg gctttccctg |
| 601 | caaccaattt ggaaaacagg aaccaggaga gaactcagag |
| | atccttccta ccctcaagta |
| 661 | tgtccgacca ggtggaggct ttgtccctaa tttccagctc |
| | tttgagaaag gggatgtcaa |
| 721 | tggagagaaa gagcagaaat tctacacttt cctaaagaac |
| | tcctgtcctc ccacctcgga |
| 781 | gctcctgggt acatctgacc gcctcttctg ggaacccatg |
| | aaggttcacg acatccgctg |
| 841 | gaactttgag aagttcctgg tggggccaga tggtataccc |
| | atcatgcgct ggcaccaccg |
| 901 | gaccacggtc agcaacgtca agatggacat cctgtcctac |
| | atgaggcggc aggcagccct |
| 961 | gggggtcaag aggaagtaac tgaaggccgt ctcatcccat |
| | gtccaccatg taggggaggg |
| 1021 | actttgttca ggaagaaatc cgtgtctcca accacactat |
| | ctacccatca cagacccctt |
| 1081 | tcctatcact caaggcccca gcctggcaca aatggatgca |
| | tacagttctg tgtactgcca |
| 1141 | ggcatgtggg tgtgggtgca atgtgggtgt ttacacacat |
| | gcctacaggt atgcgtgatt |
| 1201 | gtgtgtgtgt gcatgggtgt acagccacgt gtctacctat |
| | gtgtctttct gggaatgtgt |
| 1261 | accatctgtg tgcctgcagc tgtgtagtgc tggacagtga |
| | caaccctttc tctccagttc |
| 1321 | tccactccaa tgataatagt tcacttatac ctaaacccaa |
| | aggaaaaacc agctctaggt |
| 1381 | ccaattgttc tgctctaact gatacctcaa ccttggggcc |
| | agcatctccc actgcctcca |
| 1441 | aatattagta actatgactg acgtccccag aagtttctgg |
| | gtctaccaca ctccccaacc |
| 1501 | ccccactcct acttcctgaa gggccctccc aaggctacat |
| | ccccacccca cagttctccc |
| 1561 | tgagagagat caacctccct gagatcaacc aaggcagatg |
| | tgacagcaag ggccacggac |
| 1621 | cccatggcag gggtggcgtc ttcatgaggg aggggcccaa |
| | agcccttgtg ggcggacctc |
| 1681 | ccctgagcct gtctgagggg ccagccctta gtgcattcag |
| | gctaaggccc ctgggcaggg |
| 1741 | atgccacccc tgctccttcg gaggacgtgc cctcacccct |
| | cactggtcca ctggcttgag |
| 1801 | actcaccccg tctgcccagt aaaagccttt ctgcagcaaa |
| | aaaaaaaaaa aaaaaa |

CDS: 299-979 base pairs
Signal peptide: 299-358 base pairs
Mature peptide: 359-976 base pairs
PolyA signal: 1838 base pairs

[0323] Following is a CETP amino acid sequence (SEQ ID NO: 11). >gi|4557443|ref_NP900069.1| cholesteryl ester transfer protein, plasma precursor [Homo sapiens]

MLAATVLTLALLGNAHACSKGTSHEAGIVCRITKPALLVLNHETAKVIQT
AFQRASYPDITGEKAMMLLGQVKYGLHNIQISHLSIASSQVELVEAKSID
VSIQNVSVVFKGTLKYGYTTAWWLGIDQSIDFEIDSAIDLQINTQLTCDS
GRVRTDAPDCYLSFHKLLLHLQGEREPGWIKQLFTNFISFTLKLVLKGQI
CKEINVISNIMADFVQTRAASILSDGDIGVDISLTGDPVITASYLESHHK
GHFIYKNVSEDLPLPTFSPTLLGDSRMLYFWFSERVFHSLAKVAFQDGRL
MLSLMGDEFKAVLETWGFNTNQEIFQEVVGGFPSQAQVTVHCLKMPKISC
QNKGVVVNSSVMVKFLFPRPDQQHSVAYTFEEDIVTTVQASYSKKKLFLS
LLDFQITPKTVSNLTESSSESIQSFLQSMITAVGIPEVMSRLEVVFTALM
NSKGVSLFDIINPEIITRDGFLLLQMDFGFPEHLLVDFLQSLS
Protein: 1 . . . 493 amino acids
Signal peptide: 1-17 amino acids
Mature peptide: 18-493 amino acids

[0324] Following is a second PROL4 amino acid sequence (SEQ ID NO: 12). >gi|6005802|ref|NP_{—}009175.1| proline rich 4 (lacrimal) [Homo sapiens].

MLLVLLSVVLLAISSAQSTDNDVNYEDFTFTIPDVEDSSQRPDQGPQRPP
PEGLLPRPPGDSGNQDDGPQQRPPKPGGHHRHPPPPPFQNQQRPPQRGHR
QLSLPRFPSVSLQEASSFFRRDRPARHPQEQPLW
Protein: 1 . . . 134 amino acids
Signal peptide: 1-16 amino acids
Mature peptide: 17-134 amino acids

[0325] Following is a GRID2 amino acid sequence (SEQ ID NO: 13). >gi|4557633|ref|NP_{—}001501.1| glutamate receptor, ionotropic, delta 2 [Homo sapiens].

MEVFPLLLVLSVWWSRTWDSANADSIIHIGAIFDESAKKDDEVFRTAVGD
LNQNEEILQTEKITFSVTFVDGNNPFQAVQEACELMNQGILALVSSIGCT
SAGSLQSLADAMHIPHLFIQRSTAGTPRSGCGLTRSNRNDDYTLSVRPPV
YLHDVILRVVTEYAWQKFIIFYDSEYDIRGIQEFLDKVSQQGMDVALQKV
ENNINKMITTLFDTMRIEELNRYRDTLRRAILVMNPATAKSFITEVVETN
LVAFDCHWIIINEEINDVDVQELVRRSIGRLTIIRQTFPIPQNISQRCFR
GNHRISSTLCDPKDPFAQNMEISNLYIYDTVLLLANAFHKKLEDRKWHSM
ASLSCIRKNSKPWQGGRSMLETIKKGGVSGLTGELEFGENGGNPNVHFEI
LGTNYGEELGRGVRKLGCWNPVTGLNGSLTDKKLENNMRGVVLRVVTVLE
EPFVMVSENVLCKPKKYQGFSIDVLDALSNYLGFNYEIYVAPDHKYGSPQ
EDGTWNGLVGELVFKRADIGISALTITPDRENVVDFTTRYMDYSVGVLLR
RAEKTVDMFACLAPFDLSLWACIAGTVLLVGLLVYLLNWLNPPRLQMGSM
TSTTLYNSMWFVYGSFVQQGGEVPYTTLATRMMMGAWWLFALIVISSYTA
NLAAFLTITRIESSIQSLQDLSKQTEIPYGTVLDSAVYEHVRMKGLNPFE
RDSMYSQMWRMINRSNGSENNVLESQAGIQKVKYGNYAFVWDAAVLEYVA
IYDPDCSFYTIGNTVADRGYGIALQHGSPYRDVFSQRILELQQNGDMDIL
KHKWWPKNGQCDLYSSVDTKQKGGALDIKSFAGVFCILAAGIVLSCFIAM
IETWWNKRKGSRVPSKEDDKEIDLEHLHRRVNSLCTDDDSPHKQFSTSSI
DLTPLDIDTLPTRQALEQISDFRNTHITTTTFIPEQIQTLSRTLSAKAAS
GFTFGNVPEHRTGPFRHRAPNGGFFRSPIKTMSSIPYQPTPTLGLNLGND
PDRGTSI

[0326] Following is a PDE4D amino acid sequence (SEQ ID NO: 14). >gi|32306513|ref|NP_{—}006194.2| cAMP-specific phosphodiesterase 4D [Homo sapiens]

MMHVNNFPFRRHSWICFDVDNGTSAGRSPLDPMTSPGSGLILQANFVHSQ
RRESFLYRSDSDYDLSPKSMSRNSSIASDIHGDDLIVTPFAQVLASLRTV
RNNFAALTNLQDRAPSKRSPMCNQPSINKATITEEAYQKLASETLEELDW
CLDQLETLQTRHSVSEMASNKFKRMLNRELTHLSEMSRSGNQVSEFISNT
FLDKQHEVEIPSPTQKEKEKKKRPMSQISGVKKLMHSSSLTNSSIPRFGV
KTEQEDVLAKELEDVNKWGLHVFRIAELSGNRPLTVIMHTIFQERDLLKT
FKIPVDTLITYLMTLEDHYHADVAYHNNIHAADVVQSTHVLLSTPALEAV
FTDLEILAAIFASAIHDVDHPGVSNQFLINTNSELALMYNDSSVLENHHL
AVGFKLLQEENCDIFQNLTKKQRQSLRKMVIDIVLATDMSKHMNLLADLK
TMVETKKVTSSGVLLLDNYSDRIQVLQNMVHCADLSNPTKPLQLYRQWTD
RIMEEFFRQGDRERERGMEISPMCDKHNASVEKSQVGFIDYIVHPLWETW
ADLVHPDAQDILDTLEDNREWYQSTIPQSPSPAPDDPEEGRQGQTEKFQF
ELTLEEDGESDTEKDSGSQVEEDTSCSDSKTLCTQDSESTEIPLDEQVEE
EAVGEEEESQPEACVIDDRSPDT

[0327] Following is a GPX3 amino acid sequence (SEQ ID NO: IS). >gi|6006001|ref|NP_{—}002075.2| plasma glutathione peroxidase 3 precursor [Homo sapiens]

MARLLQASCLLSLLLAGFVSQSRGQEKSKMDCHGGISGTIYEYGALTIDG
EEYIPFKQYAGKYVLFVNVASYUGLTGQYIELNALQEELAPFGLVILGFP
CNQFGKQEPGENSEILPTLKYVRPGGGFVPNFQLFEKGDVNGEKEQKFYT
FLKNSCPPTSELLGTSDRLFWEPMKVHDIRWNFEKFLVGPDGIPIMRWHH
RTTVSNVKMDILSYMRRQAALGVKRK

[0328] Modifications may be made to the foregoing without departing from the basic aspects of the invention. Although the invention has been described in substantial detail with reference to one or more specific embodiments, those of skill in the art will recognize that changes may be made to the embodiments specifically disclosed in this application, yet these modifications and improvements are within the scope and spirit of the invention, as set forth in the claims which follow. Also, citation of the above publications or documents is not intended as an admission that any of the foregoing is pertinent prior art, nor does it constitute any admission as to the contents or date of these publications or documents. The content of each patent, patent application and other publication and document referenced is incorporated herein by reference in its entirety, including drawings, tables and cited documents.

The application's sequence listing, which the Patent Office published only in electronic form, follows.

SEQUENCE LISTING (2055 sequences)

SEQ ID NO: 1 - DNA, 98250 bp, Homo sapiens
tgtctaaaaattattatggctgaaacatacttatcatttgttttctgtagtagaaaatggcataatatgagaaggcctactttgtaatagttgtttgctttacttaatatttttcaaatcagccatctgtgtgaagactcaatatcaagttaggcctttaaaagggggaaaataattcaaaaccactggcagctgtggttttccrgccttttctattggttgaactctgtaataaatgcaggaccctacatatacaaaaggtactgttttccaaattcacgtatgtattagcatttacctttaaagttctcatccgtcagaaaaacggtgaacacagcattcagtatatttattttggtttagttacacagtgtcaaaaagttctgatgtatatggataagtagatgcactttttgctgttttgtttgtttaaacagcttgctttaattatctcaagctacttggcaggaacacctttattccaggtttcgcataatcagttattctggcaagagtagattaacacgttagtgatctccaatagacagattatatgttaatattatttgaggccattatttttaagtacaatttagacggagtttcaaatagattttaaaaatgagatttgtataaaagagtgtgcagtccctatggtgttaaaatcactgatatggaggagaagaggggttggaattgtgacactgtggcagcagatgaccttggacaagtcagtttttcagactttcctcccttaaaatagggatactaaatctcacagggtggttgtgtataatgtcacccacacgccatctcctctataactgcatttgtatgccaggaaattgtctgtgaaggcttcagtttagaatagcttcatattattttggggcactgctgggtgattttggttaaggctggccttgggagttctctgagttttctctgaaaccaaactcaatttggttgtaggttccctgtttgctgtttgttgcttttagtaataggagtcagtcagtttacctgggagttaagtttggactggagataatttgccattctttttttttttttttttttttttttttgagatagggtctcactctgtcgcccaggctggagtgcagtgacatgatcttggctcactgcaacctctgcctccctggttcaagcgattcccctgcctcagcctcctgagtagtttgggttacaggcacaagccaccacgcccagctaatttttgcatttttagtagagatggggtttcaccatgttggccaggctggtctcgaacccctgacctcaggtgatctgcccgccttggcctcccacagtgcttggattacaggcatgagccaccatgcccagccgataatttgccattctgtatttatttgcgtgttagagaccagttaaagttaagacactttctaaatagaagtcttgtatatggggcttttgagaaagtgttttcccgtgatgctggggggaaacacacatattcaaattacttgtataaaacagtttattctgtgtttaggaacttgtaggggtgaaatgctgacctgtgttactctttctttccatgatcagcrtccagaggaccagaggttaatttattctgggaagctgttgttggatcaccaatgtctcagggacttgcttccaaaggtacatcacttacacattaacttctgaatgtttttaagcactcaccaggttaggttcaggtccttaagtaccttcgtattacttttagcaggaaaaacggcatgttttgcatctggtgtgcaatgtgaagagtccttcaaaaatgccagaaatcaacgccaaggtgtgtctgcctcttcatgatggtaacaatttgtatcattcagactttcaggggagtaataaaagaagttggataaaacgtttattgagagactgtatggtgttattaccaagtaatattttgtttctttcctaggaattagaaactgtattatcaacacaaagtgatgagttaatagtagcagattgttccgttagtgctgtagtagaaaggtggagttacatattgcactatcttatgggatatgatttgatctatggttactgtgtatctagattactgaactaacactaatcgggtttttattgaatttagcacatagcaagtttcttcaaaggagtcactaatttttataaagagtacaaaagtgaatatatttcctttggaaattttcattgtgattagttggataggaaaagatcagagtttttatcaagtgatctttaaagaattttttttttttaaaaatggtctcgctgtgtggcccaggcttttctcaaactcctgagggcaagcgatcctcccacctcagcctcctgagtagctgggactacaggcatgtgccactagacctggctctaaagacatatatgacacacgaaaccatttatttttcatttcacaatgtttattcacatatatggtattagtattctaatgtagtgatgcactctaaatttgcattatatttcctagaacatctgaacagagcataggaaattccctattttgccattatcagttctaacaaaaatcttaaaagcactttatcatttcatttccctgcactgtaatttttttaaatgatcaaaaacrgtatcataccaaggcttacttatattggaatactattttagaaagttgtgggctgggttgtatttataaatcttgttggtcagatgtctgcaatgagtaaatttagcaccattatcaggaagctttctcaccaatgacaacttcattggaagattttaatgaaagtgtagcatactctagggaaaaaatatgaatattttagcatctatgtattgaaaattatgttgaataaatgtcagactattttttacataacgttgcttctgtttaattttgtcacgttcagaggtggggggtaggagatgtaagcccttgacagcaaaataattccttttgcttgatttcagacagttgcatcagctcctttgttctgtgttcatgttacacttatttaggtggctgaatccacagaggagcctgctggttctaatcggggacagtatcctgaggattcctcaagtgatggtttaaggcaaagggaagttcttcggaacctttcttcccctggatgggaaaacatctcaaggtgagtgttataataaagatcttggcttatgcaacatgaatgttcctcgtttgcatcaatttaagaataaggtatgtttacacgtatataatcagaacttttaaacatacagaattttgctttataaatagcttcgctttaaagatctcttatatatttaacttttcttaatacacagccttttagtacacacaaatttaaaaagtaggtaatgcatatattgaaaaaaaaaagaaaatgtaggcgttttatccttccattgtgctgaccgcttggttgccgtcatgataggaaattagtgctgctgcaggagaaaacagctgtcgtaagcattgtgcagctgctttgctgagtggctttgtgctttattgtaacaatgggtgacaacaagggagagactgtttaagaagtgtccttccaaagacttgggggtactaggaaaattggccaatttcttataactattaaagcttttctttagagcaaaagtcagaactaaatgctctgttatttggatttttatagctcttggaatacattgtttttggggaaaaattcattaactgcaagttgcaattctgtaactctccaattctccgtccccctttttctagtactttttatacacaatattttataaagccaggtgttttaggaatgagtttttcttccttttcccccttaatggaactttcaaatatacacaacagtggggactggataattaatccccacaccatcacccaggcctaataaataacaatcagagttttaccatagctcatctattaccctttcccttttttttaaaaaaagagtatttaaaagtaattcccaggcatcatgttatttcatccctatattcttcagtatataactatgaaaaccttttagttatcttgtatatctagaatgccattatcagatctaacagaaatcttaaaagcactttatcattttatttccatgcactgtaattttcttaaatgatcaaaaacagcatcataccaaagcttacttgtattggaatactattttagaaatactctgtgtatggaatttagttaaaagattgtcagcatataaattggataattattggatagaaaattattggttagaaaaacttaaaactacttcccttattctgattcaactattcttaacttgagaattgaggctcatatttgactctctgaatctcaccatatttaaacttgatttcctttaacaaatatttattgaacagccagtacatacaactttgcttaaggatatgagttgacctgcaggaatgaccacataaccaatttctgatctttgggcaattctattatggtttcaattttgtgatgtgctactgaagaaattgactgtgtaagaagcacaaagccaaagatgactcgcatacacctgccctgtgaagttgagggctgtgtggcctgattaaagaagcatgcatttggccgggcgcggtggctcacacctgtaatcccagcactttgggaggccaaggtgggcggatcacgaggtcaggagattgagaccatcctggctaacacggtgaaaccccgtctgtactaaaagtacaaaaaattagccaggtgtggtggcgtgtgcccgtagtcccagctactggggaggctgaggcaggagaatggtgtgaatccgggaggtggagcttgcagtgagccgagattgcgccattgcactccaggctgggcaacagagcgagactccatctcaaaaaaaaaaaaaaagaagcatgcatttgacatcagaccagctctgaaatccagccctgctacttactagctcagtgaccttgtgcaaagcccctgtcttccctgagctgtacttgggttccccttgtaaaatctccttcatgagattgctgtggacccagcagcctgtacaggacccccggtggtcagtaagcatgcacaggtgataccacatgcacacttcactatagattcagatggaggatggaggaagaagtggatattgggaggatgggagagatttccttcaggaaagactgggagaaatgtggcttttgagctgctctctaaaagatgaacagtgggttgagacctgcagtgagactcaacaagtcaaaactgaggtgggatctacttaacccaaaaaggttgtttatatatctgtgcactcagcaagcaggtggcaagggctgttgttttcctgtgggatgggactgtggtagaagtgctgtgtcatttagtaccttctgtgcttgtggtacatgggtgcgtcatacagtcatttaccatgtaactgccgtaaattccattcttcygtctcttcgatttgaattcttgattttaatttaaacttagttttcatttgttcatactcaacccactcaaaatgagtgttttttcaaatctatgtataggcctgaagctgcccagcaggcattccaaggcctgggtcctggtttctccggttacacaccctatgggtggcttcagctttcctggttccagcagatatatgcacgacagtactacatgcaatagtgagtccttcccgccatgctgggtgtggccagggctcccgggaattgaagggaattttatccrtgttacctgtaaagttcagaatggagggatgagtgtattttcatcagtctgcagagccctgctctgtttggtctgtgggtagagtgtaaatgacagctgctacctgatttgtgtattgacacaagrgtgcttttgtctgatacatagtttagtgactttatttagaacatgttactttcttttcaatttgtgctatcttcaaagttttgtgaggattttaatttgctactgtgccataatcttacagtgggcttgatgtttaatttcaggtgaaattcaccttgtggcttttcttagaaaaggcatttatagatatagttagtaaggaagttcttcactaaattgaagaaaaatcaaaggcatatctacctacttgaaattcttaacagtaaaagactgctgtgtaaataagccacagacttcacggtgctttggtctcaacagtatctgcctctgtcgtttttattttagtttagcagccactgctgcatcaggggcttttgttccaccaccaagtgcacaagagatacctgtggtctctgcacctgctccagcccctattcacaaccagtttccagctgaaaaccagcctgccaatcagaatgctgctcctcaagtggttgttaatcctggagccaatcaaaatttgcggatgaatgcacaaggtggccctattgtggaagaagatgatgaaataaatcgagattggttggattggacctattcagcagctacattttctgtttttctcagtatcctctacttctactcctccctgagcagattcctcatggtcatgggggccaccgttgttatgtacctgtaagcagatggtttctctaatataaattacactacactgtgttcacactaagcagattttgctctttttgtttcttgttttttttgagatggagtctcgctctgtcattcaggctggagtacaatggcacaatcactgcaatctccgcttcccaggttcaagcgattctcctgcctcagcctcctgggtagttgggattacaggcgcccaccaccatgcctggctaatttttatatttctagtagagacggggtttggtcatgttggccaggtggtctcgaactcctgacctcaagtgatctgcccaccttggcctcccaaagtgctggtattacaggcgtgagccaccactgcgcctggccagattttgctcttttttgagcagtctcagttactgtagaaggagatgtgtttaaatagtatatcactctgtggctgggcgcagtggctcacacctgtaatcccagcagtttgggaggccgaggcaggaggatcacatgaggccaggagtttgagaccatcctggccaatatggtgaaaccccgtctctactaaaaatacaaaaaattagccgggtgtggtggcacgggcctgtaatttacttgggtggctaaggcaggagaattgcttgaactggggaggcagaggttgcagtgagccaagatcgcaccactgcactccagcctgggtgacagagcaagaccctgtcttagaataaatacataataaatagtatgtattctggcactttcgatacaaggaattcatggcttggttgtatggtcccaagaacatatcaatcctgtgttaatataagaatattatcttgtcctctagataagctaccttaccttccaggctcacaaaccacaagtatgtagccatactgaggcatggaacagaaaactgtatttgttttgaatgagaacacatttgcctttatcagrccacagctgccttccagggtaaagtcaggcactgactgttagcatggccctgaaaggcaagggaaccttcacatacctgacatttggttttagctgtggcccgaagcagtagttctcaactgggggtggttttgtaccctctctccccaggggacatttggcaatgtgtagatatttttggttgtcacatctaggggaagtggtcctgctggcgtctagttagtagaagcaagagtgctgctgaattttctacaatgcacaggacaactcccacagtaaatatttggctcaatatgtcactagtgccaaagctgagaaagcctggcctagagtgatgggtcttcgtggttgaaactaaaagaagaaattttcctgtatagtaaaaatggatttttattttagcttttaaaaataaaaaaggaataattagaatataatgaacactcaaatatccacaattagtcattgttaatattttattatatttaagacttgggatttaattggtttcttcaaataaaacgtttagttaatattttctgtagtctctagaatcatatatttaaaagaccaaatgtaggttgtcattatgttatatataattatagctttgtaggtatatgcattctccccgctctgttcaggttttcaagggtaaggtttagttcgtcataagcatttattgagtgcatactatgtgccaggtgctgtttatatggctgggtgtgcaatgatgaataaaacacagtccctgccttcaaggaccttacagactggtgagaatgtctgggagacagtgtgatcaaatgcctctgtagatgggtcttgcagtgagcttatcagggtgctgctgtgattagaggtggggagccttggattcttgagtaagtctcactgtgacatcagctaagatggacttttatgtgcttcctttgaaggcatcacgttgggtggtttccatttagaccgaggccggttcagaacttcccaaatgatggtcctcctcctgacgttgtaaatcaggaccccaacaataacttacaggtatggagcctcccacgaagcccaggcgagcttgacgtgatatgccaggctctccaatcctcaacctttagattgccagcttgcggtttaccattttattgggctaaatatttcatgatttgttcacatttcttcttagagcagcagctatttttaaaacgtcgaatgtgccatcacattctatcacatatttttgacgtggcaatttgcattttggcttaagtaaataacatttttttaaacccactattttgagcgttcagtggtctgtaacagtgtgttataccataagaactggtatgaagtggttaactactagtttaataatagttgaagcctgggcgtggtggctcacgcctgtaatcccagcgctttgggaggctgaggcaggtagatcacctgaggtcaggagtttaagaccagcctggccaacatggtgacaccccgtctctactaaaattacaaaaattagttgggcgtgcctgtattctcagctgctagggaggctgaggcggaaggatggcttgaccttgggaggtggaggttgcagtaagccaagatcacaccactgcactccagcctgggtgacagagcragactctgtctcaaaaataataataatagttgcagatctagttgtttcatttgatatttgctgccaggagcagtcaaaactatgacaacatcaacacagttgtgctgtggaagcctgagaaacagccctatccagcctagggcatcattccctggggtcctggctgcctgctgctgtgcctatggggcagggggcagggatttaccctgccctttcctaacattatttggtgttcatcatagccctaattgttttctcattgtttcattacctcattgtttcattacctgtaggaaggcactgatcctgaaactgaagaccccaaccacctccctccagacagggatgtactagatggcgagcagaccagcccctcctttatgagcacagcatggcttgtcttcaagactttctttgcctctcttcttccagaaggccccccagccatcgcaaactgatggtgtttgtgctgtagctgttggaggctttgacaggaatggactggatcacctgactccagctagattgcctctcctggacatggcaatgatgagtttttaaaaaacagtgtggatgatgatatgcttttgtgagcaagcaaaagcagaaacgtgaagccgtgatacaaattggtgaacaaaaaatgcccaaggcttctcatgtctttattctgaagagctttaatatatactctatgtagtttaataagcactgtacgtagaaggccttaggtgttgcatgtctatgcttgaggaacttttccaaatgtgtgtgtctgcatgtgtgtttgtacatagaagtcatagatgcagaagtggttctgctggtacgatttgattcctgttggaatgtttaaattacactaagtgtactactttatataatcaatgaaattgctagacatgttttagcaggacttttctaggaaagacttaygtataattgctttttaaaatgcagtgctttactttaaactaaggggaactttgcggaggtgaaaacctttgctgggttttctgttcaataaagttttactatgaatgaccctggcagagactcctgtcatcctagcagtttactctgcgtttgttgtatctagacagtcaacaactgagttgtcggtgtttaacctgaatgcttgtttttcagaagargactgtttgtgccggtaagaatgatcaggtaaggccatgaaagtttttgttggygtttttgtttttgagatggggtcttgctttgttccttgggccagagtacattggctactcacaagtgggctggtagctggctacagccccagactcctggcttaagccacctcctgcctcagccaccctggcagctgggactacaggcatgcgccatcacacttagcttgaaagttttaatttactaagaatatacctgtgtttccccccatttcctgatttaaacagtactggcttatataggaacccatcaaagttaaattccccaaatttaaatttagtaaatttagtggtttcaccttggcaaatctgcaatagtttcaccagctcaaatttcatgcttttgtaagctgagcttatgtttgtgattttaatcctttaagtactactgtggtaactaatcatttttttgttttttttggtggtgtttttgtttttgttttgagatggagtctcactctgttgcccaggctggagtgccgtggcgcgatctcggctcactgcaacctctacctcctgagttcaagcgattctcctgcctcagcctcccgaatagctgggattacaggtgcccaccacaatgtctggctaattttttgtatttttagtagagacgaggtttcacccatgttggccaggctggtctcaaacccctgacctcaggtgatctgcccgcctcggcctcccaaagtgctgggattacagatgtgagccaccgcacccagccagggactaatctttaaagcaaagttttatatatttttacgtgagtaatgttatgtgtaggtgttctatttggcaaaataaatcagccttttctatcatgattgtggtcatttaaattaatcctcatcggaaacattgtttacctaagataaacattcactaaacaactcatagcaagacgctgggtaggtacaaagatgtcttatgtgtggttatgctttcaaagccaactgaaacccttttgtaaggagttaaatagcaaaaagtttcaaataactgtgtgcctctagaacagaactatcagaaggcaatgaatattcacaaattgtgaagagatagtttgcttcaaggaagaaatgacttgtaactagagtaggtatgaaatgatgggggaaaaatgatgaggtatgaaatgactcaccttctctccagctcaaggtaagaagggtggcagcaggagtaaaagctcagccacaggacgtgctcttcctgccaaacagctggattctgcacatgcttgggaatgaggtcctgctggtttaggaaaacaaacattaagaattcccaaagtcttgggtggaaaagcctgttgcttttcagaggcaaggccatcaccatttggcaaggggcccaaggccccaggcagctgtggtaccatctgtttctgaaggagtggggattttaccccctgaaatgtcagtttgtggcttaaactctgggttctacaggcccaaaataaatagtgccaggaaggtgcccctgaacagagctaaccagggttcagattggcaccccatccccactggggcaagcaggactcttagcaattaaggcctaagacggctgacaggtgggacatggcagaaattcagtgcttccaccacagctactcaatgtgccacratcatgggccacacaccactctgaatacttagaaaattattggtttgggcctttattattaagtagcaagtaaataactgaaaaagccccagatttcagctctggctatagcagctttctaagtctgtgtttttaaggtgcaatttcttgaatcctagttctgtagaagaaacactctacccccccgccccccccaccccccccccccacccctaaaaaatgagcttcatgatcaagtacattttggaaccctcaggctgatccaagttcatagatttcttcactgcaggccttctgggtcctttaatatgcctgaagctggggctttcccttcctgagaatggcccaggactatccatgtgcctcattttgggaaatttagtaatgagttactaaatcaacaccacctttggcattctacatagcaaacatactttgttagatgtgacattttacacactaaccaatggagataaaattttttaaatttatttttggccaggcacggtggctcatgcctgtaataccagcactttgggaggccgaggcaggcggatcacttgaggtcaagagtttgagaccagcctggccaacgtggcgaaatcctttctctactaaaaatacaaaaattagctgggcgtcgtcgtgggcacctgtaatcccagctactcgggaggctgagggaggagaattgcttgaacccgggagggggaggttgcagtgagccaagaccacaccactgcactccagcctgggcgtcagagtgagattctgtctcaaaaaataaataaatgatttcttatttatttttttttaccagtgctctacatgttcagagaaacttctctggtaaccaaccacagaaatgatccctgaaagtatagtcttaggagataaatattctttacatagccaggagggagatgagaagccatacctgtctacagtctgactgacaaaggaggaggctccaggtcccctggagaatcccaggttttatgtaataattacttggtccttttcaaagtacttggatgagtgtaggatagtctctttgtcttatcagctagtcctgcaatctaggtgttctcccattttgtagaggcttgcagagatgagagacctgtccaaggtctcaaacccctaactggcagttctgagactagaaatactccctctcaggagtggacctcctctacaattttttttagcagtcctcatgtgccaaatatggcgtgggggccaggagacagaatgaggcataggttgggcgtggcccctcccctcttgggtcttgtagtcggctgtgggtggcaagtacagcagygatggcagacaggtgtgatgagttcaaggacagggaaataacatccacagccccatcccagtactcctgtgcagcaatggaagtgtgccaccgacacaggggctacagggtgagcaggagtgacaggcgaagagaggaagagagctctgcctgtgcaaaggcggagggaacatggtgtgggaggaactgaagagaattccacataagtatgaagagggtagggagattgagactggagaaaaggggaagccggggctccccttttgaccatgcaacgcactggaagcacagcactcccagcctcagggtcctccatgattggagactgacartgaattcagaggagcttgtggaagtcacccagtcaggtccagaaatcctgcagtgcatcccttccgttacccctgtcataactgggagaagacaccacccacatgacgcaggggagagtgcaggcatgagctagcacccatattgtcccctgcatctgtccttggctatgttttacaccccccaccccttagaacattgtagtcaaactaggatgtattaaattggctggttgctcccaactacactggacaaagtggagaaaaaaaaaaaaggaggagctcaaggtttcaaattcccagctcaagctctgcataaaaactgctgtgacttccttagaagagacccctatctcctgtagctgcagggttgagatttctgagctcaagtgatctgcctgcctcaccctcccaaagtgctgggattacagttgtgagccaccctgcctggccagggctgagatttgtgaaaaggaaacccaaagtctcatcttgcatgtggctgaattatgtcgcaaatccaattcccaaattccagccttgcagggtgtcttcagttaaagtgaggacaacttgaaaatcggaatgggaacataagggaagattccagtaaagctggggacattgaatccctaaattctgtyatgttccctgccagtagaaacagcccatctacccctccctgggtccagctgtgtggacacagattggcagcgagtgtgcaggtgttatttccctacccttgtaatcatcacactttctttttctttttctttcttatttttttgagtcagagtcttgtgctgctgcccaggctggagtacagtggtgcaatctcagctcactgcaacctccgcctcctgggttcaagcaattctcctgcctcagcctcccgagtagctgggactacaggcgcgcaccaccacacccagctaatttttttgtatttttagtagagacagggtttcacccccaatagccaggttggtctcgaactcctgacctcaagagattcacccacctcggcctcccaaagtgctgggattacaggcgtaagccacygtgcctgacctcatcacaatttcttagccctttgagaaaccctgtggccttccctgaggtagctgtcttgcggggcacttctgattcttcttggatcctatgcccttcccctctttgctggacctgtaactagactcaagtcccaccaggccccagagagaaaggtacacactgtgacccatgaagaggtgtgttacacaccaaaagaactgcatgatttttccaatttatacagacaaatccaagagayatgtatgggagtagattttaaggttgtgagatcacggaaggaccatagtgttggatctggctgaacgtaatgatatgggcccactaagcagagattcttaactcagtgctttagcatgaggggttagaaagggctctaacttggttggttggttgtttggttcgttggttggttggctggctgaaacatggaccaaaaggtaggtggccgacaccgttccttattttgttattaatatatttgtatattcatatacaaacttgtatgctatgatatctaatacatattacagatataaaacaaatctttaggccaggcatggtggctcactcctgtaatcccagcacttcgggaggctgaagcaggtggatcacgaggtcaggagttcaagaccagcctggccaacagagtgaaatcccatatctactaaaaatacaaaaattagccggtcacggtgtcaggcacctgtaatcccagctactcaagaggctgaggcaggagaattgcttgaacccggaaggtggaggttgcagtgagctgagaccccatcactgcactccagcctgggtgacagagcaagactccgtctcaaaaaaaaaaaaaatcttttgtttctttcctctctcattcctttatcacctaacataagatggatcatcacagcattgaagtgacaggatgtcaagcagaagagtaaacatcacccaaggacgttgcagcctctctggggaaaggattggcatgttttctgttgtatgcaggatggttgagtcatgttaggtggaagtatggctttgttactgtctttatctggagattaagtgtggtttaaggagatgcatacaggtgccaggttgacaaagagagtactgtaatgattagttttatgtgtgaacttggctaggcccagttatgtaaacacgaatctaggccgggctttggtggctcacgcctgtaatcccagcaatttgggaggctgaggcaggcggatcacctgaggtcaggagtttgagaccagcctggcaaacatggtgaaaccccatctctaccaaaaatacaaaaattagcctggcgtggtggtgtgtgcctgtagtctcagctactcgggaggctgaggcaggagaatcgcttgaacctgggaggtggatgctgcagtgagtggagatcatgccactgcactccagcctgggcaacagagtgagactgtatcgcaaaaaaacataaaagaaaaaacaacaaaaaccccgtgaatctaggtgttactatgaaggtattttgcagatgtgattaacctgcatgggcctcatctaattatctgaaagaccttaattgcaaaactcagggttccccaaggacagagcaattaagtctatggcctgcagcctcagcttccgcctgagtttccagcccaccatcctaccctacagcttcagacgcgtctagccagcccctacaactgtgtaggacaatttctagaagttagttaatgaatacgctattggatctgtttctctggaggaaccctgactgacacaggggccggctctggaggttgtggggtccagttccttatccctgtgtagtgtattggccagttggggtgggaattgcttccaggcaggctgtgtcatttgttcaggcagggtcccctccccttggctctgcctgagagcaaaggcaggtgggggtggccctggggagggcctgaagctttgctctgtgcctcctaaagctttcccactccagggaccaggccaggcaggctggcaggaagaggcaggcttcatctggaaggatgtctccagggtggaaatgatgagatttaaatggtgtagggacccggagggtggggtgggacagcaccactgacccagctgcagagttggaccctctgaagcccattgtgtacatgagaatctgtgtgcctgattgcgtaggtgcctatacatggataggctgcgaatctgtgtgcacacagctggctggagagcacatgagtaggtatatgtaccacattgtcagcactcacccattagctcctggggactcacttgctgcaggtgatccctgtcctcgtgggctctacaccctggcaggtcaacacagactacaaagaaacaagcggacataaaatgacaagggctaggacaaaaagcatggaaaggagaggggataacgtggcaggggacattttagaatgcagtggtttcgacaccaggaggaggagtggttagacagtggtcggggagggcctctgaagaggtgacacctgaatgatgagctggagcaaaccaagcaaagattggaggaagagcctccaagcagaaagaactgcaaggacaaaggccctggggcaggagcgggtacgtgtgtcctgtatgtgtgtgtcctgcacggtggcaggtgtctgaagctgagcccagaggagctgtggagatcaggcccagaagtggagccacagcacgtagggccagagacctgcagtaagaaatgggatgtggtcgagatgggatgggagccaccgcagcaccatggggcgggagcagcagagtctgatgttgtgtacttcagggagctggagttctatgaaggaagagcgaggaggcatgtgggaggaagaacagccccactgaggcctgcagggaaggcagcagaccccaggtcagagcatgaaggtagaggggaggttccaagaagtgggttggggaataagcactggatggctgatgacagagggcagggtggaggatgcggggccagggagggctgcacagagtcctgggagggtgagcggtggccctggctggctaggaggcgccaccttgaggtgctactggaggatacgccgcagggaaggtggatggtctcttctgatgacaaccttcttgctggcattagactgaaaggggaggtgatttgtagggatgaggccagaggggttgtccccagggaagggcaccagatgtggggcaggagagctggtgtgagttgcagccgtggggcctagaggaagtcacagcaccccactgaattctcacttcctcatcataacagaccctgtgacatataaaacctgctctgcccaccgcacagggatcacaaggctggagtgaaataatggagcacttccccagagtggcacacgggacccagggacgggtgtgcaaaaccgttctaggtggaagaacactttttttttctttttctttttctttcttttccttttttttttttttttttttgagatggagtctccgtctgttgcccaggctggagtgcagtggtgcaatcttggcccactgtagtccctggctcccaggttcaagtaattctcctgcctcagccttctgagtagctgggactacaggcacccaccacaacatctagctaatttttgtatttttagtagagacagggttttaccatgttgaccagactggtcttgaactcctgacgtcaagggatccatctgccttggcctaccaaagtagctgggattacaagcatgagccaccgtgcaaagccaaaaacacttgattataatagcatgctatttttcaatgtattagataaatgtattttccatttaaagtggggatataaagctcccctttaaaatccacataagtaaaaaagtcagtctgtttaaaaggttaagtaaataacagtctagggcagatgcacaaaagacagcatcatgaccgtggttcctgaaggattaaggttgcaggaaacactgaatgctaaaagctttgtgaatgtatagtccatgaaaatgtcttttaaaaaatgaggtgcataccaagatgtttgagtgtgtgtatttggggtaggtgctgtgggcatacgggtgtacctgtgtgtgtctcacaagcaggtgtagctgggtgcttgtgtgtatgtggtgtgtgtgtatctgtgcacacgtgcatatctgtgcccacatatccatgcacacgtcctcataaggctctctgcggccaggtgcggtggctcacgcctgtaatcccaacactttgggaggccgaggcggggggatcacgaagtctgaagttcgagaccagcctggccaagatggtgaaaccccatctctactgaaaatacaaaaaattaagacagtgagtgttgatcgtgaagaagggaagatgaatgtggggattaggtgggaggaatggggtgctgtcaagatgaaaataaacttagggtggagaggctggggcaaaagagaggcccaacagtatgatttgccccagtgcggggactttgtgcctggtgatttgaggtggcagggcttctacccaggcctgatgggagctgggattaaaagcagctgtgacctaaggcaggccattgctctgtggcctrctcccctaactcttttgcagaaagtcccaggctaagagatgggggatggttgtaatgacccctcccagaaatcctggctctgtcctgcagaggtggggcccggggatcaagacgcctctaggttcaagagagaggcagaatgaggggtcagccagctggggcaggaaggcttcactctaggctgcaaggagagacctttcgccttgactggaaggacgtgaggagcctgtggcctcctgtttgcaaccaagggctgaggaaggggccgggcattcctgctgtaggtcaatgacctggagaaacacatgcttgaggacagagctcagatcattgtcccagcgcaaaccttggtgggatgtaaggtttggagcttcttaagttccaagaggcagtctcatgcagttcaaggagggctggagaagcctggtctgctcatgggagtcaattgttaaattttcaggaattttgtgagccaattattgaacacagctattattaaaaacaaaattataggctgggcgtgatggctcatgtctgtaatcccagcactttgggaggccaaggcggtggatcacttgaggtcaggagttcaagaccagcctagccaacatagcaaaatcctgtctctactaaaaatacaaaaacattagtcgggtgtggtggctcacatctgtaactccagctacttgtgaggctgaggcatgagaattgcttgagcccaggaggcagaggttgcaatgggctgagaccacgccattgcactccagcctgggcaacagagggagattgtgtctttcaaaataataaaataaaataaaataaaataataggctgggtgccgtgactcacgcttgtaatctcagcactttgggagaccaaggctggaagatcgcttgagcccagaagttggagatcagcctggggaacacagggagaccctggtctgtacaaaaaataaaaacaaaattagccaggcatggtggcacatccctgtggtcccagttacttaggaggctgaggtgaacaaagttaacactcaaaactcatcacttgtgaattactttgctacagtgcactattattattatttatttatttttactgggcagcctcttgagcctaagtaggcccagagactgtccagcatactattattgatgctttgtggttattgatattgattggatccgtatagtggaaatggctatactgtagaattgtgtgctactgtgtatttcttaccaattctgcattcagtggcatcacattcatagcttgaagttggccatggtgggaggtaaatatgtgtggtataaattggcaaagactacagattggggttcctgtctggccccccaagagctggttgttaaacttttaccagcacaccactgagttggagtctggaaagcaggcttcgtccaggttctgccctgctagctcaactggctctcaaagctttgctccaccaactggcctatggctgcttccactcaccaattctcccttttgccctctaaggccacctcttccaggaagtttcccctgatttctttgcctggacttctaaaattctttctttgccaggcgtggtggctcacacctgtaatcccagcactttgggaggacgaggtgggcagatcacttgaggtcaggagatagagaccagcctggccaacacggcgaaaccccgtctctactaaaaatacaaagattagctggacatggtgacgcgcacctgtaatcccagctactcaggtggctgaggcaggagaatcacttgaacccgggaggcagaggttgcagtgagccaagatcacaccattgcactccagcctgggcaacagagggagactccatctcaaaataaataaataattaattctttcttacctcttccgttcatattcatacagaataatctccacatctcgaaattcttaactgattagctagttcttgctattaattaaatacgtgatgcatatggccaagcttggatggatggaatccctgtattggtaaggtgggaatttttcttttcttttttttttttttgagaccaagtctcactctgtcacccatgctggagtgcaatggtgtgatcttggctcaccacaacctctgcctcccaggttcaagccattctcctgcctcagccttcctagtagctgggattacaggcacacaccaccaagcccagctaatttttgtatttttagtagtgacagggttttgccatgttcgccaggctggtctggaactcctggcctcaagtgatctgcccacctcagcctcccaaagtgctgggatcacaggtgtgagccaccacgcccacctagggtgggaattttccacctgggttctgggctcagctctgccacagattcctctctctgggcttatcctctgarggcgagattttggcatgactgagtggatggaggaagaacttggggtcagcgggctgtcaccctgctctgccgtggaaccgactcaacaacagggccacaacaggccttgttggacatggaagcaaatgagaaaattagtaatactgattcagtgtttacttaaggttctgatactttgtccattatagaccttttgcattaattttgattttttattatataaaatatatatataacataaaattgatcattttagccattcgaagtgtacagttttgtggcgtttaatacattcacattattatacaacccatctccagaactcttttcaccttgaaaaactgaaactctatttccattaaatatgaactcactccccgttctctcttcctccagcctctggtgacctccattctattattattattattattattattattagagagagtgtccctctgttgtccatgctggagtgcagtgatgcaatcacagctcactgtagcctcaaactcctgggctcaagggatcttcccacttcagcctcctgagtagctgagattataggcatacgccaccacactctgctaattcacttattttttggaaagatggggtcttgctgcatggtccaagccagacttacattcctgggctcaagcgatcctcccacctcaacctcccaaaacattgagattacaggtctgagccaccgcaccctgcccattctacttcctggctcttaaatatgactactctagatacctcatataagtggaatcatacagtatttgtctttgtaactggttcattttacttggcataatgtcctgaaggttcatcctcatcgtagtgtgtgtcagaatgcccttccttttaaaggatgaataatattcccttgtgtggatatatcacatgttgtttatccactcatcattgatggatgcctgtgttgcttccacttttggctgctatggaaaatgctgctatgaatacgggtgtgcaaatattcatttgagtccataattttgattgttttttctttttgagacagagtctcacactgctgtccaggctacagttcagtggcgcaatcttggctcattgcaacctccacttcccgggttgaagtcattctcctgccttagcctcccgagtagctgggattacaggtatccgccatcacacctggccaatttttgtatttttagtagagacagggtttcaccatgttggagactggtctcaaattcctggcctcaaatgatccacccacctcggtctcccaaagtgctgggattacagtgagccaccatgccgagtccataattttgatttttaaatggtggctactaagtttttctggcaccccttaaattttgtcaggcacttgccttaccctagtcctggccccagtttgggttgtcacagcaaggtggaagtgtactgaaaagctcgtgttttatctttatacrtttacatggggccccaaaaagggggaaaacccactttgatagggatatgacacagggacgcaggagccaaccgaaagagcccccagtggccaaagatggagcaacttgagcaacaaaataaataaagtaagcatcaaattatagcccaaagtataaaataagtgtctatgagtctatactcacatagatgatttaatacattcatattaataaatgggagagcactttgagaggccaaggtgggcagatcacttgagcccaggagtctgagaccagattaggcactgtgatgaaaccctgtctctaccaaaaacacaaaaattagctgggcatggtggggcatgcctatagttccagttacttgggaggctggggagggaggattgcttgagcctgggagacggaggttgcagtgagctgtgatctcaccactgcactccagcctgggcaacagagtgaggccctgtctcaaaataaataaatatataaataagataaatatataaataaaaataaaaataaacgggaaagaagagacaaatcttctgtgcaggagaatyccaaatgaattctgtagattctccaccctacaggagggcacacacaactccaggctgccttagtgaccttcttccaaagagtacagtacgggaagggggagcggggagaattaacttcacagtggagaaatctgacaaatacgacctccgccaagtgatcgaggtcacatcagctgtcatgaattatgttgatagtgggcatcctggatatgatgggatgaaatggcactttacctccacgacccttttcacaacagcccgtaatgccagtataaggaaaacatcagaccaggagtggtggctcacgcttgtaatccgagcactttgggaggccaaggtgggtggatcacaggtcaggagtttgagaccagcctggacaacatggtgaaatcctgtctctactaaaaatacacaaactagccaggcacggtggcgggtgcctgtaatcccagctacttgggaggctgaggcagaagaaccgcttgaacccgggaggcggaggttgcagtgagctgagatcgcgccactgcactccagccaggttgacagagtgagactccatctcaaaaaaaaaaaaaaaaaaagaaaagaaaagaaaaagagaaaagaaaaacatcagacagatcccaacagaagggcatcctacagtatacrtgaccactgctcctcaaacctgtcaagactatcagaaacaagagaaactgtcacagctacaaggagatgtgacaattaattgtgatttttttttttgagatgtggtctcgctttgtcacccaggctgcagtacagtggcacaatcacagctcactgcagcctcgaactctggggctcaagtgatcctcccatccatctcagcctcccaagtagctggggctatatgcgtgcaccaccacacccagctaatttttgtatttttttagagacggtatttcgccatgttgcccaggctggtctcgaactcctggattcaagcaatccacctaacttggcctcccaaagtgctgggattacaggcatgagccaccatgccttgccaaatgtgatgtattcttgatgggatcctggaagaggaaaaagatattaggtaaaaactaaggacatctgaataaccatggatttcagtaatgtatccacactgattcattaattgtaacaaatataccgtatgaatgcaagatgttcataatgaggccggggcggtggctcatgcctgtaattccagcactttgggaggctgaggcggaaggatctcttgagctcaggagttcgagaccagcctgggtaacacagtgagatccccatctctacaaaaaattttttgaaattagccaggtgtggtggtggcacatgcctgtagccccagctactcagaagactgagacaggaggattgcttgagccgggaggttgaggctgcagtaagccaggatcacgccactacactgcagtctgagcaacagagcgacaccctgtctcaatgataataataacaataataataataatggaaactcagtatgggttgtatatgggaaacttgctcagtttctctgaaaatctaaaattcttctgaaaatcaaagtctgcttaaaaattcacatggggtttgcattctcctccatgacaaggttttgcaggttatgattacagaggctggagagggtgcaggttatcccgcccctccctgtcccagggattcccttccccaggagctgtgtctcccctgtgagagagggtgagcttccatgaccccaagcctcttgccctctgactccggtattcttagaagctgggaccagcactgagcccaaattcccgaagcgctcaaatactggctttctgtccctatgtgacctggagcttgtagtttaacttctctctgcctcactgtttgacctataaagcagggcaatcaaggcatcccgggggtggctatgaagagtgaatgagatagcagacaacccagatgcctaccgacaggtgaagggaccaacacagtgcggtataggcgtataagggaatggagtatggacacagcctacaacacagacaaaccttgaagacattcctctaagggacataggccaggcatggtggctcacacctgtaatcctagcattctgggaggccgaggcgggcagatcacttgaggtcaggagttgagaccagcctggccaacatggcaaaatcccgcctctactaaaaatacaaacattagctgggtgtggtggtaggtacctgtaatcctggatactcgggagactgaggcaagagagttgctggaacccgggaggtggaggttgcagtgagccgagattgtgccactgcacttcagcctgggcgacagagcgagactctgtcgaaagaaagaaagggaggaaggaaggaagaaagaaagggaagggaagggaagggaggggaggggaggggaggggagggaagggagagagaaagaagaaagagaaagaaaggaagaaagaaaaagaaggaaagaaagaaagaaagaaagaaagaaagaaagaaagaaagaaagaaagaaagaaagaaagaaagaaaagagtgaacccaggaacgaaagatcacacacactgtatgactctatttacatgaaatgttcagagtaggcaaatccatagagacagaaagcacatttatggttgccaggagctgggaaagggcaggatggggaatgactgtttattggatgtggggctctattttggggtgatgagaatgttctggaattaaattcatggctgcataacactgtgaacatactaaatgcccctgaattgtacactttaaaatggttaaagtggcaagttttcactaagcagtaaattaaattctactacaattttaaaaagactaaaaaataatttaaaaaagattaaatgagataacgcaaaaaagcattatctcgaaaatacagctgatattagtataattcttactaagttttaagagtctaaggtgcaggattctaagtttaaagggataggctcttttggttttttggtttagttatttggtttttttttttaatccattatccccacccttgggaggcccccagcacccagtctgcactagaggatggggcccacctcccttttctctccaggcccagccactgaccaccagtaccctggccaggggcaccctcggtcattgccctccgtggcccaaggaagggaacagaaacaacagccaagaagacaatagccgccgggaagtcctcacatttctggagaaatagagcccattaatgaatgaagttcctccagcctgatcggaggacggggtgctggggaggcctgggctaaagggctcacctccagcccccaccctggcagggccgatggtacatgctcactcagtgagggggctccagaggtctgtgggtacgaacccaagggctggtgcccaggggcaatcagcttatgtctctgagccttgggaaacagtgagggtcagcccggctccccacgtgcttctgggcagctttggtattggagcaggtgcaaactcrggactagggcaggaccccctgagaggcgactgagcaaggccatcccgactcatgtttccttggccctgcccggggcacagcatcctgcccacatccctgcagccctggctccttcctaggggctctgaggaggcagcacttggtcatctggtcacagttgctgcagggcagttcttggccccagctgtaggtaaagtactgtatgttgtaattttttgaaagataacacgttcacacaactcagaattgaaatgccacagacattccccctgctccgcccctttcccccggatacccagtttctcccggaggcagccaatgatctcagaggctgtatacccccccagagttattttatgcatatcaaggaaagtctacatagaggactgtttctggggtacccagatgcagcgtcaaatgccatggaatactacagtgaggacattatcctttcaagctttcaaatcagagcaagggaaaggtcgatgctagagtttctctagcacccatgaagccctctccctttttctactgagttttactttacaggcaacagcaggcttcaagcttggggtcattgtcgggcaacagtatctggcaagaattcaatgtctttttctcatagtcattgtattttggcctctttctatttatggcaactgagagagaaagcttattcctagatatatgtatttaagtaaaaaataaatgaattcatggaaacatattaagcaattatccagataacataagggatggcaaaaatggtgcagatggtggaggggagacaagtagaagttggggtgctcttgttgaatgtctggctctgaactctagaggaggccgcaggggctgggcaggaaggaggtgaatctctggggccaggaagaccctgctgcccggaagagcctcatgttccgtgggggctgggcggacatacatatacgggctccaggctgaacggctcgggccacttacacaccactgcctgataaccatgctggctgccacagtcctgaccctggccctgctgggcaatgcccatgcctgctccaaaggcacctcgcacgaggcaggcatcgtgtgccgcatcaccaagcctgccctcctggtgtgtaagtatcagtgcatctgtctgccctgccaggggtcttttcatggacacccactatgccaggagcctccctggcctgaagccagccctgaagccggctgccacactagcccagagagaggagtgccctgggagggagatgggctgagyggagctgtcatcaccccctcctgacctcgccttcaaggtcaagttctttggtragaaggtcctagctgcattgcaaacagccaggtatagggatttgtgtttgtctgagacccagaatcactggggttcragttagggttcagatctgagccaggttagggggttgagtcagggggtaaagattaggaggttggtgtatatttggtgttgggggtcactctatggccaaagtcaggggttgccatgagctcaggtgacggaggctccatcactgactgttgtgtgactttggccagctcccctgccctctctgggcctcagtctcttgctcaatataataagggtatagggaggctaaatgatacaatttctaaaatagagtatcgccaagttcaaaagccagaattatagacccccaggactacagacagtgtcacagcatcgtctgggtgaggctagggttagtgtgcggctgggctcagggctgccccatttgctaggatcgtggggttcccatgtgtcaggatccagaggctagggtatgatcaggatctctagctggggtcagggtcagagctctctgtgtcccctagaattgccatcaaccttaaacccagagggaggcccagtccaacccctcagctttaagacctgctgggagcctcatctcagagaggctgagtcatggccaaggccagttgggggtgggagcagggggcttggtgtgggcctgcagcccctcatccactgccctcccctctagtgaaccacgagactgccaaggtgatccagaccgccttccagcgagccagctacccagatatcacgggcgagaaggccatgatgctccttggccaagtcaagtatgggttgcacaagtgagtcgggcctcgggtgtgaccaggctgggggtagggaggcgggaggaacagcctggggcttgcccccagcccacagggaggaaaggcagcagctgggggactcaggtctctccccttgatttggaaccagagcctgacaccttccctacccccaccctccatcccctggtgccctggggggatttattggagtrtatcaacctctccaacagcccctctaagagtcaggcttcaaagggtcctttcccactgccctgggaagatggaggtcttatttcggggtgaatggggggtagggtagaaaaatctcaacaaaataagtattttttaaaaaaatgtataaatgttgttttcttatagtacagacaggtcttgctatgttggccaggttggtcttgaactcttggcttagccagtcccccaccccaagcctaaaattagtatcttgactttatttgggatgatggtaacagtcaagggtcggttgtgggccaggtgcttttacaaacaayatcctcacctttatcatatatttttttctttcttgtttttcattttttgagacagagtctccctctgtcacttaggctggagtgcagtggcacaatctcagctcgttgcaacctccgtctctgggttcaaggaattttcgtgcctcagcctccagagtagctggaattacaggcacacgtcaccacatccgcgtaatttttgtatttttagtagagatggggtttcatcatgttggccagactggtctccaactcctgacctcaagtgatccgcccacctcagtctcccgaagtgctggggttacaggcgtgagccaccacgcctggccctttatctatcttaatctttattttatttatttatttatttatttatttatttatttatttatttatttatttattgagatggagtctctcactgtcacccaggctggagtgcagtggcacgatctcagctcactgcaacctccacctcccgggttcaagacgttctcctgcctcagcctccctagtagctgggattacaggtgcccaccaccacgcccggctaatttttgtattcttagtagagacggggtttcaccatgttgacctggttggtcttaaactcctgacctcaagtgatccacccgcctcggcctcccaaagtcctgggattgcaggcgtgagccacagcgtccggcctatcttaatctttatcatatattttagcctcttctgtaaaagaggataatgccatcgcccggatgaccctgcttaacaaacacggaaacaggagccgatagaggtttagcagcctggcggagctcatgtgcaaactcagctcagtatcggaaactcagccaccttcatggcacctcaggctgccctggagcctgggtcccggtctgtgtgtcggtctgaggccccaagggtggggcagacattgttcagggaccttgtctttgtcttaaagccaatctcctcctcctccccggccctgctaaacacgctccccaggggtggtctctgctacccgcgcacattgggccttgagtcttggtaaatgtttctgagccaccagggggcgccagcggtgctggatgccacttcgccttttgcaggaaaactcccgccgctagcgggtgctgtggggcgtcccaggtctcgcgcagccacgccctctgtgtgaccttgggcttcagtttaggcttctgtaaaagagaataatgggcaaggtccagtggctcatgcctgtgatcccagcactttgggaggccgaggtaggaggattacctcagccagggttcaagaccacctgtctctataaaaaatttaaaaattagctgggcatggtggtgcgtgcctgcagtcccagctactcaggaggccaggggaggtcaaggctgcggtgagctatgattgcatcactgcattccagcctgggtgacagagcaagactctgttgctaaaaaataaaagaggataatgctatcctagacctatgtgttgcaagaggtcagacatggcaaaagcgttgagaagttaaagaaatagtatccttaataaatcagcaataattcagtaagaccagactgccatagactagatgtcatagtcattaatatataactgttatcccaaacgtatatgagtggggtagaaataaaatatgattggccataactatgattggtcatgattaatgttagatgaagttggataatgggtaagatgagaattcttcacactattctctctaaagcgaatggaataaaatagaacagaacagaccgggaaagccagatatatgtggattctccttgctgggcacagtgtgtcatagtggcttataatatgggatttggagtgggatggacccaggatcaaattcccttctactgaggttttctgaagccacataagctgtctgagccatttctgtctcagttcagtgggtacagcaatagtgactacctcgtgggtagctgtgaggattaaaccaggaaatgtgtataaactctaagcacagtgcctgccacacagcatgtgtttggtacgtgatggccgcttctattgtgtcatattccatgtgctcaagccgggccctgggggagagttcagcaagggtagagggatatgagagtgaatgtggcccactggcctccctgcctgcagtctctcctctctgatccttgcttcctaagggtcttcactgagccccacctctgaccaagtccccggcggcacaggcagcacagatcctctgctgtacctacaccaagaccccagggccaacgcttctcccattgtgcagctccacctctgcccccggggcctagctgaggcctcctccaagctgagccacctactatcttccaaactcccaccctccatctggtgtcacctcctcccagaagccctctgtatcagtttcctgttttctgccataaaaaaaatcactccaagtttagtggcttaacatgacacaagtttaccattttacagtttaaaaggctagaagtccaccatggccctccytgagctaagatcaagctgtcagcagaaccagattccttctgggggctataggggagaattaattccctcgctttctgcagcttctagaggcttcccccattccttggcttccctccatctacttttatttagggcgagggaagcttcctgctctgactttctcatttatggtattctcccctgctttccagcagctgtgattgtcccaagtcctgtcctctggttctctaggccagaaaaactatgatctaccagagctcaagaacttgaaagggccttttcccactgtcccttctcacagtgagagccggagcccagcttcgtgctagaatctgtgaaaatggagaaatgcaccctgtgctgttctcttcctccacccggcatctcccctgcagcccggctgggtttttttgtttgtttgtttgtgggtttttttgtttttttgtttgtttttgagacagagttttgcacttgtcgcccaggctggagtgcaatggcacgatctcgactcactgcaacttctgcctcctgggttcaagcgattctcctgcctcaacctcccgagcagctggaaccacaagcatatgccaccactcccggctaatcttttttttttttttttatgcatttttagtagagatggggtttcaccatgctggccaggctggtctcgaactcctgacctcagatgatccacctgcctcggccttccaaagtgctgggattataggcgtgagccacggcctggcccagtctgactgttttcacttactctctaatgtctcaggtagtgtttattgtattctgtgcggaggtcaagaatttagtcatccaaggaggttagtgtattaggagcttacgcagctattaccagaagagactccactcaaaaatttggtacgtggctgggcgcagtggctcaaacctataatcccagcactttgggaggccgaggcgggcagatcacctgaggtcaggagttcaagaccagcctggccaacatggtgaaaccctatctctattaaaagtacaaaattagctgggcatgatggtgcatgcccataatctcagctacttgggaggccaaggcaggagaatcactgaacccaggaggtggagactgcagtgagctgagattgcccgctgcactccagcctgggcagcaagagcaaaattctgtcacacaaacaaacaaacaaacaaaaaaaacgggttgggcatggtggctcatgcctgtaaccccaacactttgggaggctgaggtgggggaatcacctgaggtcaggagttcaagaccagcctggcaacatggtgaaaccccctctctactaaaagtacaaaaattagctggatgtcgtggcgggagcctgtaatttcagctactagggaggctgaggcaggagaatcacttgaacccaggaggcagaggttgcagtgagccgagatcgtgccactgcactccagcctgagcaacagagccagactcagtctcaaaaaaaaaaaaaaaaacaatggtatgagctttaaatttctgtagaactgaaagaggattggagattgtagtagggtctaattctaaattagagcatttagaataatgtggagtctggtcaacatagtgagacccccccaatctgcacaaaaaagacaaaaattagccaggcagtgttggtgcatgcctgtggtcccagctattccagaggctgaggcaggaagatcgttggaattcgaggctgcagtgaactgtgattacacaactgcactctggcctgggcaacagagagccaccctatctcaaacaagaaagaacaaactaaaaaaaaaaaaagaagaagaagaatttggagcaatctagttgtttcctataccagaagtctttgccaatctatttttttttaattttatttttaatttttgtgagtacatagtaggagtatatatttatggggtacatgagagtacatagtaggagtatatatttatggggtacatgagatgttttgatatagacctgcaacgttttgtcaatctattttttttttggcgacagtcttgctctgttgcccaggctggagtgtaatggcgcgatctcagctcactgcaacttccgcctcgtgggttcaggctattctcctgccttagcctccaaactagctgggactacagacgcccaccatcatgcccggttaatttttttgtatttttgtggagacgagatttcaccatgttggccaggctggtcatgaactcctgacctcaggtgatctgccctcctcggcctcccaaagtgctaggattacaggtgtgagccaccacgctggcccaccaacctatttttgatctaactttacctctggtggtgtattgatactcttccgaatcaattttcacccttcttcatataccatttacatttctaagaatttgtccatttcatttcatctagttaacctcatttgttgacatacaattgttcgtagtattctctcataattccttttatttctgtaagactggtaataatggccttgcttttatttctgtttttagtaatttgagtcttcttctttttttttttttttgccagtctagctaaaggtttgttgattttgttgatcttttggaaaaaccagctattgttttcaccgattgttgtttttgttctattatttcattcataggcactaagatcctgattacttccttccttctgctagctttgggcttagtttgcccttatttttcaagttccataaggtggaaagtttgattattgagttgagatctttctcttttttaaagataggcatttctagatataaatctccctgtgagcacggttccctccatcttcagcacaccagggttgactctctccgggcgttcttccctggtcacctctccccttcctctcctcttctgcctcctcttccacttttcggtaccctgtgattgtattgggaccacccagataacctaggatcatctccccacctaccccaaggtccttaacttaaccatactttcatatgggtaacacgagttgagtgtggtacccagggtttgacatgttgggtaacatatttgcaggttctgtggattaggaggacattttgggggccatgattctatcttccaccctcgcctagacaaaattggaggctcactccttgggctccctggatgacccccaacatccttcctcacttccattccttcccagcatccagatcagccacttgtccatcgccagcagccaggtggagctggtggaagccaagtccattgatgtctccattcagaacgtgtctgtggtcttcaaggggaccctgaagtatggctacaccactgcctggtggtaagcattcctgtcagctgatgccccatgccctggccctctctgggctggagggctgaatgagggtcctgggtccttggctctttccaggctgggtattgatcagtccattgacttcgagatcgactctgccattgacctccagatcaacacacagctgagtatgtgtcaagcgtcctctggggaagtgggagctggactccagggcttggcctcagcagagggggaggttgtgcaggcagagggttctggggccaccaaaggaggcccagcctgggaagtttgcagggktggggaccccagagctggccaagctcttgactggcctgggcagcatgtggataccatctgatagcggaggctgccctgaggtcatgtcgggtctccctgcagcctgtgactctggtagagtgcggaccgatgcccctgactgctacctgtctttccataagctgctcctgcatctccaaggggagcgagagtaagtacaccaccctgtggcccccattcctgctcgtgcccatcctgttagtgtgtccacggctccytccaggctcaaccccacacagggcatgcttgtgggtggccaaacctgagggcagcaataccttcagtggggtcacttcctaccccctcccatcaatacaccctcaaaggctggaaacaacaataaccaacagctagtaactaacagctattaagaacttgctgtgtgcaaagcactattccaagcccttttcatgaattaattgattttgtccttaaaaccaaccctaggatatagattctgttatcatcccctttttacatatgggtaaactgagtcacagagaggttagaaaggaaaagctcatatctacggagtgcatcctgcattccaagcaccacactaactcagagataaaactctagccaagctaagtaacttgctgaggacacacaactcgccactaagggatgggagtaggatttgaacccagcattctctgaccccagaagctgagttcctagatactttactctcctgcttcccagggtggggctttttgtcttggccaacaccctctgtcaaggagctgtgggtaaccccattgcacagaggaagataacaaggtttggagagtccctagtcatgttaccaatgccaaacctggaaggcagaagggaactggtgggtggggtctggagaggagccctctattcaggccattttctgactctggagcagacggatacatgtatgaatttggactctagacacgttctcgtgtgtgtgacaggtgtgagcgtcacaggagctgggccctcccgaggaattctgggatggtgccacagttaattcttgggtctgaggctccgtgttctcagctgcaaaatgggagtgataattcttacttcctgagctacaagagtcagggccaacagagccatgaacggtgcctggtacacactaggcrctccatggatgcacaggactggtcaggggctcattgtggtgcttgctgccttcaggcctgggtggatcaagcagctgttcacaaatttcatctccttcaccctgaagctggtcctgaagggacaggtgagtgaggctggctgactccctgtggtccagggccatgcccaggaggctggatccctttcctccctgcctttccctgagaaggtgccactcccaccttctccatgtggccagtcccctgtgccggtccccagcactgccaccaccacgcagctggaaggaggcactgcctctggcctcctttcctgcctggaaagcacctgctctgtctgccccagatctgcaaagagatcaacgtcatctctaacatcatggcygattttgtccagacaagggctggtgagtgygtttctgtctgcatgcctcagaagacagcagtgggagccagaaagccacctgctgcactatgtggccttgggactgtcactcttcctgtctaggtcccatgggctctatctggctctgacacttgatgattagttatgagcatactttggcaaatctctgcccctttgggctgcagcmtcacaagctgtgtggcgttgggcaagtctatagaactcaggacaaatgggtgattaagtccaagaggactccaagattctcctggaagtagattaggaaaaaagataattagattgctcacatggctgggcactcatccatgtactgtactctcctatgcagtacagagcagagctgggtttcagcccaagtcttggactctgctctgaaccaaccttctagaagggctctacctacccagacagacagacttgggaaaagagagaatgaaaaagtgccacacccctccccgcacacccaggtcccactttacagaggggaacactgaggctggagggttgggtagctgtgtggatgcaggggagcggtgactcagggcaattcccccatcctgaggccctgcgttgatcttttcctcctgcagccagcatcctttcagatggagacattggggtggacatttccctgacaggtgatcccgtcatcacagcctcctacctggagtcccatcacaaggtaggagttgtgggagggtggggcagggcccagcttccccaggggagttggtccttttttgtgctctgacaaccccgtcccccagcttcaaccttatggcagccaagagtcctggggcgctcctcctcattcctgatgctcctccgcattcctgatgctgcgaggagggcaggccacagcgacgtgcccctgacccctctctgcaggcaccagggctgcccactacaaggatcccagcaaagcaccagctccttcctagagggcttattcggcttctgtcatcctctacagcagtggattgtggcccccycccagggggtactgacaaaagctttggaccctctattacttaggatatagatttctgtaacaaagaaatccgaaataatagctgcttaaacacaataaacagttatttccctctgttgcgttctgagcatctgcagccccgcgggatcaggaggctgcagggtgtcaggcacgcaggccccttccacgtgttctcagccagccccaggcatgacctcatcccagggtcctggctgactggcctgaccaccacacccactctgctcacagcccgttggcctgaacytgatcgcaggaccccaccctagctgcaagggaaactgaggaatttatttcagctaaatattgagaccagctaaaagttaagtggtacagaatggagggagagattggagaagactttagggcggacccagccatctttgtaacagagcctctccctggaaaactggacagaaggatcatttcagaggttcatggccactcctgaagcctgttcacaacccatgggctggatgatctagtggggcgggggactgggcagcagcttgttttcctgattttggcctccaggagccgatggtcaatggactgccctctgcaggggcagggctggtggtcagctggggcggggtgggagctggaggtccgtggtcaccagctgccctgactaatgtcgttacttgaatataaccctgtgaaggcaggaaccacgtctgtctggttcacttcccacggtggttgagacatagtgggcactccggaagtatttgttgaatgagtgaaagccccgctgggggaaactgggtacagctctttcctcagtttccccatctgcactctgggctgaatgctggggctcctcccaatctccctgaagctggacctgagcccagtagggacacacagggtccagccagcgtcctggcttcctccagggtcatttcatctacaagaatgtctcagaggacctccccctccccaccttctcgcccacactgctgggggactcccgcatgctgtacttctggttctctgagcgagtcttycactcgctggccaaggtagctttccaggatggccgcctcatgctcagcctgatgggagacgagttcaaggtgagtgggtggggctgggctgctagggratccagatggcatgtggtatgtgtgtgtgtgcacacgcatggggaggagggaggaaactcggaaacttggtggtgggcaaaagaactaagctggagcaatagcagtgaagtccagactgggcacagtggctcacacctgtaatcccaatcctttgggaggctgagatgtagcaggacgaaccgcagacaaaactcctcagacactgagttaaagaaggaaagagtttattcagccgggagcatgggtaagactcctgtctcaagagcggagctctccgagtgagcaattcctgtcccttttaagggctcacaactctaagggggtctgcatgagagggtcgtgatctattgagcaagtagcaggtacgtgactgggggctgcatgcaccggtaatcagaacgaaacagaacaggacagggatttttacaatgctctttcatgcaatgtctggaatctatagataacataactggttaggtcaggggtccatctttaactaccaggcttaggtcaggtaggcccaggcctggtttcgggtctggttccttggtttcgggtctggtctctaggcgttgggctacctgcctttagtttcgcttctctttctttttctgagtataaaacaatataaaacaatatgagagggtctgtctctcttctctcagagacaggagggtccctggaggccaggagttcaagaccagcctgggcaacatggggagacccctgtctctacaaaaataaaaataagtttaaaaatcagctgtgcacggcrgtgcatacctatagtcccaactactcaggtggctgaggagggaggatcacttgagcccaagaggttgaggctgcagtgagctatgatggcaccactgcactccagtgtgggtgacagagtaggactccatctcaagaaaaaaatacagtccagcatttattggagtcaactatgtgttgccagatagatagatggatagatagacagagtgatcaatagatttaggtatagatataacttggcacgtagtaactgtgcattaaatataagttgatattagacttacatttattgcagttatatttgctacactttgttttgttgcactcatcctgtgaaataagtactgttacctctgttttgcaaacaaaaaaaccacaaagctcagagaaggtaggtgacttactgaagatcacacagcctgtaagaggtggccccaaagcctgtactcttcacctatactgtactagaaatgcttaggtagtttccaggctgtgcttgtcattgaactcatgaggaaactgaggcccacagaggggaagagacttgtgcgaggtcacacagcatgtgtggggcacagtggggagcagaagccaggcctccagccgggacaggggttccctgttccacaccctgcccagagcatctcacatgttgtctgggaggttgggagttgcgtctgaggaggggtccagtccttgaaactgcccttggtccctgcgaagttttcttctgaggagtggactttactccacccaccctccaacttcctcatttcttttcaggcagtgctggagacctggggcttcaacaccaaccaggaaatcttccaagaggtaactgccccctgcccctgtgtggggtttatctcacgtaccccaatcctgctctggcttcaagagcccccacacagccaataacaccaccaatggcaacaattataacagcgaacacagctcctactcggttgttcggcatggagtgaagcacttagtgtgtgtgacttccttcagtgctcacaccgaccctatgagtggggcggtcaaactgtccccattttacacacagggaaacttagtgaatggcaaggctgggtttgagcccagctctattgcccccaaagataaggctccattccctgctccatttcccaggcatagrgacttgtagggggctggaaccccaggatcaactctgggctcagagggccccagcaataagtgactgttgattactcctgatcccaaagctgacttcaggcaagctccttggaggtcgcagccccttcttgctatgcccagtggcaatgatgttcataatcccactcctcagtgcagggttccactaagaacccatgatctcctacctcaaatggacctcatgctttctgagtaagcctccctcagctttctggtcacctcactccccccacccactgcaatgacttcttcaggccttccctgccatcctcaaatctccagctgccccctcctgtctaccttccacttccctctccacacacaacctgcttaccagagagctgagcagagccaccaacagaacttcccccccacgtcgctgctcccagtcgcaacccactcacccacacctgcgccttcctgcggccgttctcctgttctaacagaggacrgtccctcttcccttctgaactcaggccgtccagccttccccggctctgtgatgyctctctccytgcacatacacaactcacaatattgggcaggcccctgaccggcycttctcccttagccccttgtctgagtcctgttcctttgatgtcctatttctagtctttccatttctctctgtctctacctcctccccaggctaccattatctctagtggggacccatctgtagctcccggtgggtctccctgtgtcctgataccctccaataatctgttccccacagcagccagaacaatcttttcaagaaataaaactggtcattcacctgcctgcttaaagccggtgtaggatacaggctaaacgctctcccatggcctccagggccctgcattttctcatcctgtctacttcttcatctagttgtttcccacccagcgtaattgtaactgtttagttgaaagttgacgaggtcttttgtcagctctagaaatttcttttcttttctttcttttttttttttttaagacagagtcttgctctgtggcccaggctggagtgcagtagcacaatctcaactcactgcaacctccaccttccgggttcaagcaattctcctgcctcagtgctgaaattacaggtgtgagccacagcacccagcccatcagctctggaaatttcttcatcactctctcttccatgattgccccatccctattttctccatgcctacctcctggaatttccatgagacacacgttgggccatctcattccattttccgtgtctcttagttgctctgtcgtgttttccatctcttttatctctatcctaaattctggatagtttcttcaagtatctttttagttcattaattctttttacagctgtgtcttatttgtttacttacccactgagattttcattttattttatttaattaattaatttatttatttttgagacagagtctcgctcttgttccccaggctggagtgcagtggcgcaatctcagctcactgcaacctacgcctcctgtgttcaagcaattctcgtgcctcagcctcccgattggctggggttacaggggtgcaccactgtgcccagctcatttttttgtatttttagtagagacggggtttcaccatgttggccaggctggtcttgacctcctgacctcaaatgatcctcctgcctcagcctcccaaagtgccgggattacaggtgtgagctcccgcaccccgccggccctttctttcttttgagctgagctatgtatttaatgaaaccttttcttgtgtatccagcrgttcagtggtttcttggggcatgtgatctccttgagcccagtcccacaggctgtaatcgaaggtcctcaggccacactccccagccccgctggctgcctgcgcattccttatcttggccatgttccttccacagggctcttgtccacactgtcccctctgccagaatggtttgccctcccccatgccatctgctcctcctcctgccacctcagggaaggcctctcccacctccctgactaggtcaggtcccctcgtgccacagcctrgtgtgtctctcctttaaatactcctcagctgcagttttacgttctgttctgggatgccctggaaaatgctgggctcctgcagatatggcccgcagctcctgcgctctctgctctatccccacccctagcccagctgctacagcagcttccctcggagggttaccatgcagtaggtcctgttctaagctctttccacagattatctcattccatcctcaggacaaccctatgaggtaggatctatgattatccccattttacagatgaggaaagtgaggcccagaaggctaagtgaaggcatcctcagcacatcctgagagaggagttcagggtaggaatagcttcactagcacacagatgagaaactgaggccyagagaggacaagagtcctaatttgcacagcctggggcctgggcactaccccgagctacttccttttccccagccctggggcccggagccagctttgtccttcccatctccgagggcatggactgctgctgccctgatgggcccctgtcctggccatgggacccctgtcttccacaggttgtcggcrgcttccccagccaggcccaagtcaccgtccactgcctcaagatgcccaagatctcctgccaaaacaagggagtcgtggtcaattcttcagtgatggtgaaattcctctttccacgcccagaccagcaacattctgtagcttacacatttgaagaggtgaggcgggtgcagggagaggtggtggtgggggaacctgactcacatatgggccgcagagggcaggggcctgggggtctctgaagcctccagatccttctcaccacctctgctggcactggttgtctcttgcacatggctccttacaatcaaaatcacatcatgcaagtaacgagggggtacacacgtggtttccacagcttaggtaatattttctctcttttcttatttttattttttttagagacagggtctcactctgtcatccaggctggagtgcagcctcacactcatagctcactgcagcctcgaatcctgggctcgagtgatcctcccacctcagccctcctgagtagctgggaccacagacaaacaccaccacacctggctaatttaaaaaaaaaaatttccttagaggcggggtcttgttatgttgtccaggctgttctcaaactcctggcctcaagcaattctcctgccttggcctcctaagttgctggggttataggcatgagccaccatgccaagcatatgttctttcattcttatttttatttattatttatttatttacttatttatttttttgacacagagtctcactgtgttgcccaggctggagtgcggtggcacaatctcggctcactacaacctctgcctcccaggttccagcgattctcatgcctcagcctcccaggtagctgggattacaggcatgcgctaccacgcctgactaattttttgtatttttagtagagacagggtttcgctatgtgggcccagctggtctgagactcctggtttcaagtgatctgcccgcctcagcctcccaaagtgctgggattacaggcatgagccaccacgcccagccaatattctcctccttaagctgagcagtggacaatggtgtttattacccgagtccacaaccctttattcattagggccacaagggtttccaaattcagaacttctgtgaatttgtaaaagtagtatagtgtatagacactggatatattgcagaacaccccaatagggtgtggggtggcaccccacaatcaattctcctcaaatgcctcaattggcatttctcctcatatgaagcaagataaataccatacatagcttcctagacaatggccaggttttgccaacaaaacttaagaaaaaacttgtagttttcagatcctgtttgattttataattacaaataaggaattaagaatcagtattatctttaatgctccttagaatatcttcaatttttttttttgagacagagtctcactctgtcacccaggctggagtgcagtggtgcaatctcggctcactgcaacctccaccttcctggttcaagcgattcgcgtgcctcagcctccccagtagctagctggcactacaggcgcgtgccaccacgcccagctaatttttagtagaggcggggtttcaccaggttggccaggccagtttcaaagtcctgacctccagtgatccacctgcctcagcctccaaaagtgctgggattacaggcatgagccactgtgctcggccaatatttcttaatacattaagaactaaagacaagagcgatacaatcacattgtggaaaatatagaaaaatagaaagaagaaaaccactgtcaccataacccccttctccaggggccttcgatgtggtgactgggtgcatttccttctggtgctttgttatttttaaataaattttttatcttggagtaactttatatttgaataaaagttgcaaaatacagagtgttcccatatatcccccacccacttcccgctttgtccacatcttacataaccatgctacagtgtcatagcggagagattaacattggtgcatgactgttaaccaaactctaaactttatttgaatctccccagtttttccactgatgataccctttttcttttccaagatctgatccaggatagcacattgtatttagccgttcttttttgttgttgtttgtttgtttgtttgtctgtttgtttctgcccaggctggagtgcagcggtgatcctcccacctcagcttctcgactagagatgtgcactaccacgtatttttttgtagagacagggttttgccacattgcccaagctggtctcaaatccctgggctcaagtgatcctcccaccttggcctcccaaagtgttgggattataggcatgagccactgtgcccagtttatttagccttttaaatatctctttaatttttgtattactttccttttcatttttctgttttattccttttggctttctcatgtggatgtagacatattattttatttacttatttttttgttgttaagaatctgaaacattgagcatttgttaaaaaaaagaattattcggccgggcacggtggctcacgcctgtaatcccagcactttgagaggctgaggtgggtggatcacatggtcaggagttcaagaccagcctggccaatatgatgaaaccccatctctactaaaaatacaaaaattagccggacatggtggcacatgcctgtagtcctagctacttgggaggctgaggtaggacaatcgcttgaacctgggacgtggaggttgcagtgagctgagatcgtgccactgccctccagcctgggcaacagagtgagactgtctcaaaaacaaaaaaagaaaagaaaagaaaaagaaagtgacttctcaggtcctaaccccaaagccacaggtgctggggaactttcctcggttttcagaagagcagtagctaagcctggttcccgtgtcatccttgcctctccagtccctcagtggaaagaatcaggggccctgagctaggagggttgctctctgcttcgggaagagccctggctcacagcaaatttggtttctctccccaggatatcgtgactaccgtccagscctcctattctaagaaaaagctcttcttaagcctcttggatttccagtatgtgctgcagagaagagagggggcggtcaactccgcaaacctctccctggccccttggagtcaggcacagggcggggtgttggtggggaaatgtggcccctttcytctggggcatatgggctgactgcagggagataagaccctgcctagatagaatcttcgtggggaagaaggggctccaggaagaatggagggctgccaggaagaagggcctggcaggaggagagcgctgcccgagcaaaggcctggccgccagaatagcaaatctcaagggaatagcaaatctcaagagagtgccccaaagggcctgagctatgagacagaagcactggctgctattcttagagtttctttcccaggggatgttacaggagggggcccaatggagggtcaaattatcatcgcttttttatttcaggattacaccaaagactgtttccaacttgactgaggtaggtagtcttggatagactgggggaaataagtcctgtgggacctcctgccttaaagaaagcaggcggagggccctaaaggaaatcaggcaaccagaccaaaagaatgtggaccaggtggtccatgctgtgtctcttgtgacccttcttctccctgccatgtcttttgggagagcccttgtgttgcaaaaatgagagtgtggtggtatggattggggtttaggcagaacagtactggccaagcagcgcctccctggacctcaattttccctctgtggaatgggctagcaatcctgggcctccccagggcgaaggaaagaccactcaggaagggcaccgtctggggcaggaaaacggagtgggttggatgtatttttttcacggatgggcatgaggatgaatgcttgtccaggccgtgcagcatctgccttgtgggtcacttctgtgctccagggaggactcaccatgggcatttgattggcagagcagctccgagtccrtccagagcttcctgcagtcaatgatcaccgctgtgggcatccctgaggtcatgtctcgtaagtgtgggctggaggggaaactgggtgccgaggctgacagagcttcccatttcaccttgtgggcccttcccaggcagagcttcaggtgcccctcttcccagtcattgatacttagcggtcctggccccctttcctctccctgctggtggyattgcacgccaatgactcggccagatgcccagacccctgttcttggtttacctgcagaatattatctttgccaccccgcgggatggctcaacccactttcaggatgcaggtctcctaatagcaacctgatatagcagaaagacccctgggctgggagtctgagacctagttctagcccagccctgaacctcagtttccctttctgtgaaacaagaatgttgaacttgatgattcccaattttccttttgaccttgaaatggtagaatatttatccctttgaggtgactcggatggtagactctcagacaccatagcacacgtgtgctgggggtattttggaccaggctctgctgagagctttctgctcccttccccacagagtatgttgagctgactgtgctttccttttgaacatctgcttgtccacatggcttaggtaggagaggaagggcgtggaaactggaatgatcctagtggggtgtcttggcatctcttggcctcattttccccatctgaaccatgaagctaaaactaggggatgtggattaaatggttcctacaactacttgcaaggagaccactctgtgtggttgcaaagaacactttgagaagctgtgtgggaaagtttccttcctagcagggtagactcagctaactgcaggtcatgtggccattgtggatgggttgggagctcaagtttggggcagaagggaattttttttggcagcagagtggcaagccctgccgccaggcaaactctgctcttcctcatcctcagaagcacttgctcactctgctaaatcaaagtgaaacgcatgtttacagaatattggtccaaaagggtctcagcatctcccactacccagggtggcagagcctcgggccggccttgctccccaagaagggctgactggggctctgtcccctgccccagggctcgaggtagtgtttacagccctcatgaacagcaaaggcgtgagcctcttcgacatcatcaaccctgagattatcactcgagatgtgagtacaaagcccccctcaccagcccctgttcctggggagagaggcccagacaggattcctggggtgactgggggctgttggggagacagacagaggggcctctaccagcttggctccctcctggtggcctgggagtcagcccagctcrcccctctctcctactgcccctcccttcagggcttcctgctgctgcagatggactttggcttccctgagcacctgctggtggatttcctccagagcttgagctagaagtctccaaggaggtcgggatggggcttgtagcagaaggcaagcaccaggctcacagctggaaccctggtgtctcctccagcrtggtggaagttgggttaggagtacggagatggagattggctcccaactcctccctatcctaaaggcccactggcattaaagtgctgtatccaagagctgsggagtccttcttctgtggctggcgggtagagggrgggggaagggattgtctcaccagtgccgtccacctcttttcagcccttccaaggcagctgcccccaaaccctccaagcttcatgatgactggaggaagaaatccaaacttctctccttgggactcacgatcctccctgatcaggtccctggataccttccaaatttatcccctttaacccagcactctccttgtctgaccagcttcctgcaggagctgtcacacactctctgtcccttggggttccagtgctggacagaaagtgagggaggaccagggcttcagatcctgaggatggtgggaggggaaggggccctcagaggtctggtttctggtagaaatggaggaagacagagcctttaaaaaggcaaacgactttattccagaagataaactgctcacgagcctgagcttatttccagctcacctttttttttttttttttttttgagacggagtctctctgtgacccaggctggcatgcagtggcacaatcccagctcactgcaacctccacttcccaggttcaagcaattctcctgcctcagcctctcaagtatttaggattacaggcacccgccaccacacctagctagtttttgtatttttagtagagacggggtttcaccatgttggccaggctggtctcgaactcctgacctgcagtgatccacctgcctcaaccccccaaagtgctcatgttaaatatggtgaaccccaagtttttcttcaaagaatcagtatgtctgtatgttcagctctcttattctttgattctccattttaaagtttaacttcctggttctcttcgcccccttgcttctaatttcagtaaacaaccttttccatcagttttattcagtagttcacacctgttcccctggtcacttgctccatcctgactcatcccagtcacctgctttgacctgagtcacccctggtcacctgctctgatgtaagtcacctttagttacccgttcctaactgtccttcctgccaaactactcacctcgccactctggctcatacctctgctctctttaaaatagccaatcggaattagcttagaccgtgcggtccaaccttagccaacaggggaacaacatagcagcagggattacctgggtcaggaataagaaccccttcccctcccttgttcaactgtgctctcaccattgttccatctatgaggagcaccctttctacagaaactaaaaattgcttgctgagaaaattaaatttatgtttgagtgctatttctttgcagcagtggagaacaagcattcctaacactgggattgcaggcataagccaccgtgcccagcttccagctcaccttcttatgctcaaattgtgtcttctccttcccaccctcaagctacaatacaaaaagtttcttccaaccctctcagtcttggaaggtagcaggctctattttctctgggtgtgtaaagaaaatgcctctcccacattagccaattgagacgggaggaagcgcagcaagatgctggctagtgcaaggtccctggggtagaaagaatcatgatggattcaagaacagtcaagagggctggtgtggccctgaaagcaaagaactaggggcgagagatgaggcccaaccagcaggcagggtcacataacaaaggtgataaaagggcttggcctttatttcagcagccaggagagacagccaggaggctggggctgtggggagctcagaagtaagatgccccttccagtctgggaatatgtgaggggagggcaccatcttctgagccaggtttcttcccagcccttccctgcccttccaagtgctttctgaggcctgtttctcttcctcccctggggcctaatgcaagtgtctgactcactaagcaggagcatcatgggcgggatgggcggctcttaaagggccctggcagaaggagtcagtgtgatctcgccagtccctgagtccaacgtgggaattctgggtcttgggatattggcctttgaggtggtgacaccagttaggagccacatcccacccaagaatgtccccttgaagaggctgggaaggcccaaggcccccaccttgatgctacaatgacagaatcaggataacttggcagccctaaggcagctcttccttgaatggaaacttttatctgcatgaggggcagacagagaagtcacttggagtcttaacccttgtagaccccagcctgactgggactccagaaggtcccagggctctgctccagaaagaagggtaggggcatgcccccagcttccttcagtgaccttggagaggtctccccagggctgagctgggaggcacttccatgtcactgtctcatccaaggagtgcgattagcaggagatatggagtccagagggtgagaggcttaccaaaatgggactgacctcygagcccctctcccaaattccagcccctccatccaagcctagaagctctgacctagtcctattgaagtcctcctggcctgggtgtgtgttggggggaatcctggctccaacccagttaggatcatttccataaagaaggccacacctgctgcttcctctggggaaaaacaagtgctccccaaggccagcaccaggcagaagcacatcctgccacctgggctgctgaccttgggcaggatggggcccgggtgtttggcaaataggaagggtagagggaaggcctggctttcagacctgggtctaatcccagctccccccaaccccagttactaattctgccatcctggggcccctctgtgcctccatttcctcttctattcaatgggatgataatactttccatgtaggattctggcaagggctgggttagcccagaggaggagcccatggtggccaagagcaggggctgcagagctggcctgcctgggtccacccttctgctcctctgcttctgtgtgatcttggccaaattatttagcctctctgtgcctcccttttctcatctgtaaaaagaaagataacagttgccatgaagagtaaaggagaggccgggcatggtggctcagacctgtaattccagcactttgggaggctgaggcaggggtatctcaggagttcaagaccagcctggccaacatggtgaccccccccatctctactaaaaatacaaaaaaattagctgaatatggtggtgtacacctgtagtcccagctactctggaggctgtggcaggagaactgcttgaacctgggaagtggaggttgcagtgagctgatattgtgccactgcactgcagcctgggcgacagagtgagactgtcttaaaaacaaacaaacaaaaagattaaaggagagagcggctgcattttgggaggccaaggcgggctgattgcctgagctcaggagttggagaccagcctgggcaacatggtgaaacccggtctctactaaaatatgtttttaaaaaaaattagctgggcatgcacctgtagtcccagctactcgggaggctgaggcaggagaattgcttgaaccggagaggtggaggttgcagtgagctgagatcatgccaatgcactccagcgtgggtgacagagcaagactccatctcaaaaaaaaggagagagcacagtgtctggtatatcctaagtgctccacgagtgccagacattggttatacttcatggaggtgaggtacacagaggtgtctaggtcatgcggactcactccatcctccagttaaccatgactccctccccacccacctcctgagttctctctgctgtcaaactttcctctcatatctccagtttcccacccaaaagtccaaacactcaagattccttctcatctccaacccataaaatctgatcggcttctccacactcaagtgtaaatgactgatggccatttgattgacactggaggggctggcacatttttagcacatttttagccaaaggtatgatgtgctgatagcggactctcaggccacaagccagtctgaggacagggaaagtttgaggaggtcactcttccagaaccctttggtgataacctttctggcaggcctggtacccccagagtgaaaagggctccagggtcaagacccagctctgcccctcattgctgtgtgaccttcagcaactcacttgatttatctggacctcagcttcttcatctgtctaatgggataataatctttgtcctgccctcctcacagggctgttcagaattaaatgcatctgaaaatgatctgcatttgtgtcttggactgtggttatttgttcaagtgtctgtctaccctgcctgcacagggagcgggtcagggtcttccctgggacttcatgcacaggtctttcctgggacttcatgtaggaccagccatcccgtcagtgctcagtgaacatgagctgcttccctgtgggatgtctgggaggtgagtggaaggccttcctagcaggcacatactggaacataatcaatccctcccatgcatacagctcacacccacattcttatccattcccaccatgcccctcagtggcctggggagactaggaataccccacttgacagataaggaagctgaggccaggggaggtcaaggcatttgtctgaggttgcacaaccaggagtggtgaagctgggagtcacacacaaggaatcactgcaaagtctgtgtccttcccactctgagtaggacttgaaccagggatgtccgatgctgatgcttgtgtcctgaccactaccttgcagcgtcctcacccacacccaccccaggcctgggaggcaggggagcaccagcggtctgggagtgaaagttgcttccctgtgggatgtctgggaggtgggtagaaggccttcctagcaggcacagctgcccaccggatgagtatgtccagggggagaggagccccctgtcccaggatgtgggcaaaaacctggagaagctgaagctggactttgaggatggcccctgacyccatcctgggacagccacctccccttccttctgccccctccagtccctcctctccttccctgctctccctcctacctctttccatctccccctttctgcctgtgattcctcctgtgactggggcaagatccttcacctctgtcctccctgagcctcagtggctcacctggaacatagggtgatgcctgcagaagtattttagggttactttatgagataaattggtagactgtttttcccgggtcagccagccaggggttcggtgaataggagcgaacgctgctgccattcccttctcccctagttcatcctggaggctctccgctctccccctggttctaagtcccctcctcctgcaccgtatcccccctcccatccaacccagtccccactgaggcactgagacagggtcttggcccagggtccccacccacctgagctccgcatgtgagccgaccttcacccgcctgcctcagtttcccgtccacgaaaggggtgagcgcccccacgtctcctgggactgtccttgggtccgatgcggggctgtggggaggtgccagggtgtgggcgcagcagggagcgggtgtgttaggcccccgcccatcccgcgcccgagccccatctggctcgggctggcacctcgaatccacgtgatttctcggcagcagccgccagttccatgcactggcggagcagctctaggcggcggcttctactttcagtttcgtgcagagcgcggaggagccgcgagcgctgagggtgagtgccgggagctctgagggtgagtgccgggcgtgccgcggggctgcgggacccgggctggggcgagcggaagggagaggatcggggttcgaattctgcacggagaggggtggaggggatgtcagaggccctggagcgggaggtgcgggtggccgggtggctggccgatggatagctgggtaagcggacagggcgccagtggcccggcagcgcgcacagcatgcgccccggcagtttggaggaagagttgccggcccgcagaggatggcagatgagggtcgcctggatggggggacacagtaagcggctgtgctcccctccctgcgcagctcctgtcacctaccggatccacccactctctctgtcttttactttgcaacttttcattgattttaaaacaattacggaagttacactgttcattgtaygcaatttagactttttggcctaaacaactttttattgtggaaaattccaaacatatacaatagtagaaggaatagaattaggttgagccttctgcacctgcgggttttcatataatgaagccccacctatccacgttcagcttggacagtcacgaccccaaggccacctactcacgaccccaaggccacctaggtagcccaatctccaccgctggttattttgaaacaaatggcagacagcatagcatctcaactgaggtatttcagaatgtactaaaagataaggcatcttttaaaaacaaaaccacagtaccaccagcatactacaaacattttaatagttattccttaatgtcaaatctccagattatttctaaggaacatttaacctcataagtgataggtgaatacgtgggtgttgttttgttacttgctttctgcattcccatgtggttttcggtcactattctcacccagaaagccaggacctgaaactggctggggtgatcattcgaggaggtcggaagaggctcctaccttcagtgccgtttgcgtccattttataagttggagttcttatgtttccttttttaaaaggttgaagtttctgcagacctaaaaagcagtttgaaaactggcagttcccagcctctaaaacccgggggtagcaggaggcagagagtaccccggggccagatcctggagcctcattgtcccttcaaaycaccttccgtttctctaagggagaaataaaccttgaaaagccatgggcttttcagatgtatctagatgtatctgatgcttttcaggtgtatctagactcccatccagcgtgctttctgcaaaacttactgaaccatagcccagaatggccatccatgatgcccacccgccttgtctcctgaagcacattgccaggtggacctgcacatggtgtggacggcagacagactggggctctcaacaactggtatttgctggatgaccatgaactaaccattcaatttctcgaaactttggtttctcgtctgtaaaatgaacatatgcaaatctatcctacaaagtgtgttttgtggattgaatgagatgatacacgcccacccagtgccttgatcaaccttaaaatgctgcacaagtgtgaggggagatggatccttgaagaagacagacaagcagaggggaaagatcttggaagagtttcacaatatgctgaactttattcctggatcagayacagagctgtccgggtgtccacagggccgggtcagcctcctcagaccccaacacacataccctcttcccctctgaggaaaattcagcaaaacttcttttgctgttgttgttctttattccttttttttttttttttttttttgacgaagtctcactctgttgctcaggctggagtgtagtggcacgatcttggctcactgcaacctccatctcctgggttcaagcgattctcctgcctcagcctcccgagtagctgggattataggcgcccgccgctacacccagctaatttttgtatttttagtagagatggggtttcactatgttcgccaggctggtgtcaaactcccaacctcagatgatccacccgcctcggcctcctgtgggattataggcgtgagccatcttgcccggactcctttttttttttttttttttttttaatagacatgaggtctcaaactcctggcctcaagtgatcagtctgcctctgcctcccaaagtgttgagattatgggcgtgagccaccacacccagccataacttcttagcatgacttttcccatttgttatgagttcaattgtgcctccccacaaaagatatgctgaaggcctaaccctcggcgcctcctaacgtgaccttatttggaaatagggctgttgcagatataactggtgaagatgaggtcatactggagtaggatgggccttgaatccaataggaccggtgtccttataagagaggagatggacacatgaagacagagacatacggggatcagacaatcatggacggaggaggaagagagtgcggcgatgcatctaggagccacaggacacctagaatggccagcagccggtgggaaccaggagaggcaaggacggatcctctcctccagccttcagagggagcccggccctgaccacacctcgatctcagactctgacctccagaactgcgagagaagaaatctcagttgttttaatgtacgcagcttgtggcactttgtgacagcagatacagcagtactgtgacaacactaggaaacgaatacaccatcccagcatctctgctctgttttccatacagaattgaactaaggaccaggcaagctaatgcaartccaaacactgtaaaaactttggaggcaatctaaggatgtgagccagatttgtttgccagatcttttttattttatttatttatttattttattttattttttttttttagtgagagggagtctcactctgttgcctaggctggagtgcagtgatatgatctcggctcacagcaacctccacctcccaggtttaagtgattctcctgcctcagcttcctgagtagctgggattataggcacctgcccccatgcccagctagtttttgtatttttagtacagacaggatttcaccatgttggccaggctggtcttgaactcctgacctcaggtgatccacctgccttggcctcccaaaatgctaggattacaggcatgagccaccaacacccagcccatatattcatatttttaatggacttatacatgaaaatggtatctcacttttaaaaataaatgatatggaattatgcgttaaaggraaattaaatcttattatatcatgttttaaaatttttaatttttcatagctaatacatttatgtagttttaaaaatgtaaaacatttggaaagatataatgaaaaataagtctccttccatctcctgtctcccagccacccaattgccctccccgaagacaaccaatgttatcaggttcttgtgtctccttccaaagacagtctaagtgtgtttttacaaacatggatatatacatatatatatacacgtatatatgtgtatatatatatacacacacacacacacacacatatacacatatatagacacacacacacatgtgtacttttcccttctcacaaatggcagtgtactatatgtagtgttctctaacttgggttttttttttttaaacttagtgcaatttggaaatctttctacatcaaaattttaaaatctgccctttccctctttctttttaacagctgcctagtatttcaccgtatgactgctctgtaattgatctaacagttgtagaacacttaggttatttcctgtcttttgctatttcaacagtgctgtaatgaatatccttggtcaggcatcatttttcatacgtgggagtgaatctttaagaaaaccaggagtggatttgcaaggtcaaggggaatatgcagtttgaacttggataaataaggcaaattatccccccttaaatgttgtactaatttttgctcccaccagctggagggggaggggccaaatttccatatttgcaaatctgggagacgaacaatggtgtgttttttatgcctcttattacgaatgagtttgaacatcttttcaaatatttaagagtcacctgtagctcattttccataaactgtcagttcatatcctttgcccacttttttattggcttttggtctttttcctgttgagttgtaaaagcacttttcatgttaagggaatttgctctttgtctattatatggttatactgtcatttaaaatggtggcatagttgcttatagaatgtctgaaccatatgcgtcattgttagatatttatattgggtctcattttcttgtattatatatgggatgttttccctgttttttgtaaaaaaaaaaaaaaaagcaagatatgacattttaattcttccaatagttctcaccataatggtgaaggaaaggaaatacgtttgggaaaatacttcgataggatttggggtggctggaacctgtgtgcaaaatggccaacagggaccaggaccattttgggtgggaagagagtgctttgcatggtgtatgtgtatggggcggaggggctgtatttgctcctgaaagaaaagggggtggagggaggggagaagaaaggaaggagagaaggtggagggaggttagccacagagggagatgactcccagaaacttcttaggggaaggatggcaaaagggcattttcggtgagtccaggaatgccctctgctccgtgtgaggcaggtaccagcactgcagacaccggctctggctcaccacctgccatcatgagtgcattcagcttctccaytgagcttccacacaccaggccctgctctaggcactgggctacagccgggaacacaaccaactccctgccttgtggagctgatgaggcagtagaaacagacaaacaagtaaacaaagatgtgcatgtcatatgaggtcaggtggaagtgactgcagtgaagaaggcaaggcaggcgagggtggagcatgctrgatagagaggcagatgtagccttcttgtagggatgttgggacatttgagagagaacttgaagggagcgtggcagggaaccatgggccatggcatctggaggaagagggaaccagtcagaggggatggcaagaaacaaaaaagtggggagaagaagaaagcagagaagaggagaggagggagaagaggagaaaatgctgcttaaagtctgcttttgtgctcccagatgctcattgtgaatgacatttttgcaatttttgcaattttgttttgtaatttaataatgggctgggctgggcgcagtggctcacgcctgtaattccagcactttgggaggctgagatgggcagatcacttgaggtctgcagtttgagaccagcctggccaacatggagaagccccgtctctcctaaaaatacaaaaatagccaggtgtggtggcacgtgactgtaatctcagctactctggaggctgaggcaggagaatcgcttgaacctgagaggtggaggttgtagtgagttgagatcgtgccatgctctccagcctgagttacagagggagactcggtctcaaaaaaagcaacaaactgcttgaattaaagcaggagccctcagctagaggagtgcccacccacctcctccccaggaatcgcagagctcccaggagaggccatagcctcctataggtcatggcattgcaggtgggttggtgtcccagctggctgtttctgtctcaagaaaggaagggctgctcccgctgacatccaggcgtaagcaacgccctggtgaacatcctcgtagctagagctttgctcacattctggatggcttccttaggctcaatcctcaaagtggactcctaaagggatatatgaacttttattttttaaatgtttgaaaccgtgttgtcaaatttctctcctaaaagattgtgccaatgtagagaggctgccgaccgctggaagcttcccaatcccccagcacctatcccttgtgggtgggatggatcctgtaccatcgccagaccctcaagaaccccttgtcctgcayggtcccttctgtccctcctggtgaaatggaaggagcatgcatgccttgggaagctggtgctttgaggcattcagatcttaccgtggcatcatgtttgaagagagaaatagcttgctgttttgtgtgtctctcaatagtcttattcactgagttcttgaaggtgtcctgtgtgtttctggactgcagaatccttttattgaaatggacaggtcagtgttttcccagagaaagacctatccagtaggagttcacaagaggattttaggaggtatgtggagagggcatccgattccattgaatcgtaaagtgacaaatttgttcccttttcagttctttttcattcttccagactagtgaaagagaaagcctcagtcaggtgctaacgcatctgtaaacctctcacactcttgatattttcagcaaggggaggccaggcctccggtcagagccctgggtctgcagcaatacccagctacagttcaacagcatcatagtgttttttgttttccttggctttctttctttctttttttttctagacaaggtctcactctgtcacccaggctggagtgcactggttgcacagctccgtgcatagtttcctgcagcctctatttcccaggctcaatcgatcctcctgcctcagcctcccaagtagatgggactacaggtgcgcaccaccacacctggctaattgttttttgtttttatttttgatagagacgaggtctcattacgttgcccaggctgatctcaaactcctgagctcaagcagttttcctgccttagcctcccaaagtgctgggattacaggtgtgagcctccatgccccacccttgagtttcttttcgatgataccttcagttcgtggcaagtggtacttcaaaaaataaagttaaaagtgacatggtttctagaaaagctttaaggaaatggtgttctggctttcagataagtcaaaaaaaatctcaaacatgagtaaagagttttggaaattatacacttacccctagagggtgagtttgtgggggaaatttcataatgtatacttccagaatatttagaactttccaaatgagtacaggttatgttcgtaaacaggaaaaataataaagacataataaaatgataatttagttttaaaagacgaccatttgttgaaagcagtattatatttcagttaggaaatggcctctggaatcagcatagattttattgttttatttattttgtttttgagacagtgtctcactctgttgcccacactggagtgcagtagtgtgatcacagcccactgcagcctcaacttcctgggctcaggtgatccttctgcctcagcctcccaaatagctgggactataggtgcacaccactatgccaggctaatttttttgcattttttgtaaagacagattttcaccatgttgccctggctggtctcgaacttccaggttcaagcaatctgcctgtctcggcctcccaaagtgttggaattacaggtgtgagccactgtgcccggccagcatagattttaaatccaccttttgttgcttgacttcttggagcctgtttcttcatctatgaaatgcaggaaacgtgcctggaaatattgcttgagattctaatggggaggtgcaggtggaatactgtagcctgatgcccagcctatgccgggaactcagtacataacagccaatgagcattggctgcggactggacatgtcccctccttgtgctgtagtattaatgtctccaaccctcacagtgatcctgtgaagtaaatgtaaaatcaccacccagatgaggaaaacagtggcacagagaggttaagaaaactgtccaaggttgcacagcactaaaatgttgaaatcaggatttaaacccagccctcctgaccccagaggatcttttttcaaaaattatgttcttttattttatttcgagatgggggtctttcacagtcacccaggctggagtgcagtcacaatatcacggcttactgcgcctcaacctcccaggctcaagtgatcctcccacctctgtcccccaacccccagttgcttaggagcacaggcacacgacaccatgcctggctaatttttgtactttttgtagagatggggtttctccatgttgcccaggctggtctcaaactactgggctcaagcgatcctcctgcttcagcctcccaaagtactgggatcacaggtgtgagccactatgcccagcattagaggctcttttaacagctccacaattccctgtgagatgggctgcatacaaagcattactcctgcttgacatatacacaaaccatggcccaaagggagctgggacttgtccggatgtcagcctctaagtcagttttgggtcagtgagacccaaaaccaaggctctagccgtctagcccctccaacctttcttctgccccagttttatgggtttggcaatgtctgccaggatgggagggagcagttcagatgatccagtctggaggcaaaattctgctaaattcaaagggcccagcctcaagtcactgatgtctttttttttttttttttactttaaaaaaatgtattmattctaaaccacacaagtaagacacgaatcagtcttccttgcagaaagttaaactttttatacataaagctgatatctattttactcactgcttccagccccatgcctgtcccctctcctgcagtaacccctatttgatatgtttccagaactttatctaaaccttcacataataaaaataattcttatatagggcttactaacttccaagcactgctttaagagctttacatatttaagccccacaataactctgtgaggtaggtgctgctcttatccccattttacagatgagaacattgaggcccagagaggctatgtaactggcctggcgtcacccagcctgcagttggtggaaaggtcagtcccaaatctaggcagccttgctccgaaattcatgctcttagcctctaagttataaaacatgctattatcgacctgtgggaagaaacagtattgctgtttgttgatgtgtattttgagacaagtgatatcatgttgtgcatatcattatacaatgtgtcttgtttattccatgatacatcttgaagatacagccacgtcaacaaaaaataagtccctttcctgtacataatcccacagcgtggttacaccaaactttattatggctgtctagggtgtttaaagaccgctgctggaatttctttatccaagactctgtgtgtcttagcccattggggctgctgtaacaaagtgccagagactggctggattctaaacaatagaaatttatttctcacagttctggagactaaagtctgagatcagagtgccagcatggtcgggttctggcaagagcccttttccgggttgccgatggcggacttttcattgtatcctcacatggtgcaaagcaggctagagcattctcttgggtctcttttataagggcatcaatcccattcactacggctcctccctcctgacctaattacctcccccagaccccagctcctaataccctcctattaggggttagagtttcaacatgtgaatttcaggggagcacaaatattcagtcgatcacattgtgtattctgggccccaaggctgtccattttgctttctgctgagaagtttagtggtaaggtcaaagggtagaagcgcagtaagatctagaagtcactgctgatttgccctacaagatgggcaaaccacttcccagcctgcagctctgagccctggatccaggccttctctcctttatgtctcgagcttactctgtcccctgccttacttaccaaaccaaagcaagactcctctgggacattcctgccaggccccatggcaaggttggagctgaggaggggacttccaaaccttggttttattttcactttggcttgggtgtgccaagccctggcagagccacagagttggggcacgaggtgccaagaaacagctcccagtctgaggaaggtgctctgccctgggaaggggataragctgagtgttggttatggggagacatcctcaaggtctccatctaaatatggtcaacttggtggccttcctgtccccagggcctttggrgctctcagaggacaagaatcactcagctctgatttgctggagaagcagagccccaggtgggaggtagcgaggagcctgtctctccccactgggagtggagagctgggtgccacagcctcaaacagttgttcccagacatcggcacatggggaaccccccgggagcttccaaaagtgccagtgcctgcgttctacctcctgggatggtgctgtgatgggtctggagtgtggcccattgggattttttaaagaccctcttcccaggtgatgccgtcgtgcagacaagcatgggaaccactggcctggaagccccagggagaggcctctggggcccgggacacgcaagcgggagccttctcctagcagccttgctagccacccaccccttcctgtgggtgctagacccaaactgccagggctgagcaggagaagcaaggccaccagctggccacctgctgtcccagccaggctcaggctggcagtagggcaccccagtcctggaggagggtgcatctggaaagcttgggggctcttggtggaaagttcaagcctttagcataggaaggtggctggggtgaaggaggcagtttaaagactagtgatgtgggctgggacccagattgctgggtttccaatgaccagaagaagatggccttgttggactggggacagggaccacccaggctcaggcctgaggctgggagtgcaggcatgaatttgagtgcaggctcaggaacatccccagggccgccaggcagggagacacctcttcaactcctggctcctcgactctagctggtgacctaggcaggtccctttcccactgtgagcctcaatttcctcatgtgtaaagcatcatgactgtgtgttttaagtcctttagggccctatctttgtgagggacaacagagacgatggttttcacaggcaacagtcacccctgcatcatcactgactcacagaaatggatatgccctataaggacatctcttgcttgccctgccagcatttgtgggcgggggaggaaatggccactaaccattcctgaaggcacctcccaagggacccctgaaaggagggtgacgcctcccagaaagagaccagtggcccagcccagccctgctcttagttttgtttcctctgctttgaatgccagcaaggcctttccctcccagggcctcagtttccccatctttacaatgggcacagcatagaccccatcactggggctctttctgctctgccaccctgtgcatccaggctcaggtgttatccgaagccctgacatcatcagccattcccggggggaaggcagaggcgctgggttctctgtgtccccctggtagggcttggtgtaggattcagggaggattggagggcctctgtggcctcaggtcctcccccagggtccccaggccctgacctgtccacctggacctaaagaaccaacaacagcagcactttctgtttctttgaggtatttctgtccaaatgtctgtagtcatgactggggtgcctggctatcaccccacaaactgcatcctttctgatctgcacagatgagaaaactgaggtcttgtttcccctccatcccaagacctaatgggacctcctccttaatctaatcctcaagaggcagaaacaggatggaaagcaaaggaatggcagccagaagtctgyggctccactcctgtcctctctgcatccctcacttccttccttacaccaggcgtcaggggctggagagacggaagaagcgatagcaacgacaaccacactagtggtaatcatagcttgtgtggattgaaccttttttttatttttcatttttaatttttgtgggtacatagtaggtgtatatatttatgggttacatgagatgttttgatataggcgtccagtgtgtaatcacatcagggtaaatggggtttccatcacctcaagcatttatcctttgtgttgcaaacaattcaattatactttttgttatttttaaatgtacagttaaattattactgactatagttaccctcttgtgctattgaatactaggttttattcattctaactattttttgtacccactaaccatccccacctcccccaccctggcctcctactatacttcccatcctctggtaaccatccttctactctctatctccatgacttaaattgttttgatttttagatcccacaaataagtgagaacaagtgatgtgtgtctttctgtacctggcttatttcacttaacataatggcctccagtgccatccatgtccttgcaaatgatgggatctcattctttttgatggctgaatagtactccattttgtatgtgtgccacattttcttttactcttttattcttttctttctttcgagatggactcttgctctgtcacccaggctggagtgcagtggcacgatcttggctcactgcaacctctgcttcccaggttcaagcaattctcctgcctcagcctcccaagtagctgggattacaggcatgccccaccatgccctgttaatttttgtacttttagtagaggaggggttttgccatgttagccaggttggtctccaatgcctgacctcaggtgatccacctgcctcagcctcccacagtgctggaattacaggcgtgagctgccgtgcccagstgccacattttctctgttcattcatctgtcgatgaacacttagattaattccaaatcttggctattgtaaacagtgctgtcataaacatagtagtgcagatatctctttgagacactgattcctttcttttgggtatatacctagcagtgggattgctggatcatatggtagctctaaatttagtttagtttttttttgttttttttttttttttgagacagagtctcactctgtctcaaggctggagtgcagtgcgtgatctcagttcactgcaacctctgcctcctgggttcaagcgattctcctgcctcagcctcccaagtagctgggactacaggcatggggcgccactacgcccagctaatttttgtatttttagtagagacagggtttcaccatgttggcgaggatggtctcaatctcttgacctcatgatctgcccacctcggcctcccaaagtgctgggattataggtgtgagcctccgtgcccagccctatttttagttttttgaggtacctccgaactgtcctgtagtggctgtactaatttacattcccaccagtgtatgaggtctcccttttctccacatagattgaggtgtttgtttgtttgtttgtttgtttgtttggagatgaagtctcgctctgtcgcccagactggagtgcagtggcgtgatctcagctcactgccgcctccgtctcttgggttcaagctattctcccacctcagcctgggattacaggcgcctgccaccacgcctggctaattttttttattttaagtagagacgaggtttcctcatgttgcccaggctgctctcaaactccggacctcaggtgatctgcctgcctcagccttccaaagtgctgggattacaggcttgagccaccatgcccagcctggattgagtttgtatcatgtgccaggttccatgtcagggattccacatgccccatcccacaaccatcttgccaggtgggcattatgatgaccccccatagcagacactgtcagagctcccccaaccccatctctgcccggatgcccccactcactgtgggtgacacctgcatccttcttccggggtcgcctttgcctggtgggcattgccttgctcagagatgcctgggcagtcatgcctccctcccccgcccactgggggtgcagtgacgtgaagtgtgaccgaccacccagaccccttgcacatgcgcaggatggacctcttctatcatcacgctccagttctcccatgtggcaggctgaagcraggcttttgaaaccatatctttgctcagctgcctctgctaccctatctttcttccaccaccccctcaataaacaacttccacaggaacccccttgggctctgcttctagggacctgacctagaagatcctcattttacagatgaggacgctgaggtacgaagaggctgcgtaacctaccagggtcacacagctttggtgtggagtagggactcaaatccagggccctggtacggaggcatttgccctcaccaagattcaggcactgagagaagcygacgggcctagagaatggcaagacttgagatagcagaaggaaggagagagggtgagaaatggatccccgtgctgaggtctggtctggaaggagaagtctgcaaggtaggaaaaagaggaaaggggacgtgaggtagggaagcaggatgtgcaaggcggggacttgtgaaagagaatgccggggggtggtgagcagcatctcatgggcaggtcagcaggtgcaggagaggcctaggagggccggggactggatgatgaaagggcatttgtttatttatcctttgtttttgttttttgttgtttaaattgagaccagctctcacaatgttgcccaggctcgtctcgccaactgtctgcccactcctggcctcaaacgatcttcctgcctcagcctccaaaagtgttgggattacaggcataagccaatgtttattcgtcctgagccttccctggacacctgatatgtagctgctttgtggtggtcacagttccatggtgtgactttatcctggaggcagtgggatgctgatagcaagttcagacaggcatgaggccagaccagagctgagttttcaagataactccagccagaggtatgcgtgcatgtgcacatgtgggtacatgtatgtgtgtgcacgtgcatgtgtgtatgagtgtggactagagatggaatggctttctgagcaaagggaacagccaaggcaaaggcctgtgggctgcagggagagaacaaggtttgatctctgcactccctcctctaagctctgtgtcaacagcattttcaggacagcaggaaggattcccaaagagcacagcagcgagggcagttggagggaggcgtctgctgggacactgaaaccagggyggggtaaactcccctcgcacctcctcagactcagagcccccataaatcttccaggtgcaccccagcccttttccctctctctgtctgaactggggtggcatgatcccaggactgcaactccacgtgtctggattccccttactgactgcgtgaccctggccattttccctccacctttctctcagcgcccccatttgattactcggcctcaggggtgcactggggattcttagaggtaacacttcgaacggaaagccagaggtcctggtgccaaaatgcaaatgtgagggcttgaaagttcatcgggttttattttctctgttccgtttgcagtagctcttctttcttgttttctatagaacagtaaaaaactttatgcatttgaatatcgtgaaccttgtaattcatatgcaatataaaaactactagctatgcatggagaaatcaattgaagaacagtggcttagcatgtctttctcattctttgatggctacctcaaatcaaatcaatatgaacttggggtcaggcatggtggctcacacctgtaatcccaacacttggggaggccaaggcaggaggatcacttgagcgcaggaatttgagactagcttgggcaacatagcgggacctcatcttaatattaaaaaaaaaaaaaagagaaagaaaaaaagtgaacttgggaggtttgaatgacaactcgtatagctgaagtaatagatatattcaacttttaaaacttaattttcattagataacacatgcatatggtataacattctaggccaggtgcagtggctcacatctgtaatcccagcactttgggaggccaaggtgggcagattgcttgagcccaggagttgaagtctagcttgggcaagatggcaaaaccccatctctgcaaaaaacacaaaaaattagctaggtgtggtggtgtgcacttgtagtcccagctactcaggaagctgaggtcggggaatcatataagcccaggaggtggagactgcagtgagccacgaccacaccactgcactccagcctgggtgacagagcaataccctgtctcaaaaaaaaaaggaaaaaaaattcctttcactggggacaattacctttatgaatttcttccagaaatattaatgtatttgtatacacatttttttttgagacagggtctcactctgtcacccaggctggagtgcagggatgcaatcttggctcactgcagcctggatacccccaggctcaagcaatcctcccacctcaaccttgcgggtagcttggacaacatgtgtgcaccaccactcctggctaatttttgtattttttgtcaagatggggttttgccatgttacccaggctcgtctcaaactcctgacctcaagtgatctgcccgcctttgcccctcaaagtgctgggattacaggcatgagccaccatatttattttttctttacacaaaggaagcatattctacaccctgttttgccccggctctcttttaaaaaacagtgtatcttggataccattccatatcattccataaagttcatcttcatcctctttttttttttttttttttttttgagacagggtttcactctgtcgcccaggctggggtgcagtggcactatctcagcttacctcaacctcccgggctcaagtgatcctcccacctcagcctcctgagtggctggatgctgcttctttctttttgatggctgcaaagaattccattgtatagatgtgccataatttaatcataatatgtcctctttgatcatttaggtttttccaatcttttgctattacaagcaaggccacgttaaatatccctgggcatattattttgcacattatgaagatatctgtaggctaaatacctgtgtatggaattgctcagtgtgattacatggcatttaccactttggtagataaaggttgtatcctgttacatgtccacggatgaatttcttccagaaatattcatgtatttgtatacacattttttgagacagggtcacaaaaccgttaacacattattattattattattattattattatttcacattatttagggaagtttcatttttttgtgagctatcactgataatttcttatttactcatcatcttgtatttctcttccttgcacattggggaaatgtctattctagtttttaatgtaaatgttcttgtggcttttttagaaaaaatcaaaatgtgcacattaaaaagtttgaatggttcaaaaggtcctaaaaagggtccacagtggaaaaggctctcctttcccagcaggcccagatccctcctcagacacaagcctgtcgtcagtttcctgtgtagcttcccagagttggtcactatgtatgcaaatacacacacatttaaaatatacacactccacgtccacgtggaatgatgcaaagcatctaagtgcccgttaattcacaaccttgccaactcagtaatatccttgcgaatctaatagctagaaaatggtgtatctttttagttctaatgtattatatttattctattttctgtgagcttgaacatcttttcatatatttaaaagtcattggggccaggggtggtggctcatgcctgtaaccccagcactttgggaggccgaggcaggtagatcacctgaggtcagaagttcgagaccagcctggtcaacatggtgaaactcagtctctattaaaaatacaaaaaaaaaaaattaatcaggcatggtggctcgtgcctgtaatcccagctattgggaggctgaggcagaagaattgcttgaactggggaggtggaagttgcagtgagtggagatcgtgccactgtactccagcctgggcaacagagtgagactctgtctcaaaaaaaaatttttaaatgtcattggtgtttcccttttttgtaaaccttttatgttctttgcctagttttctatgaggtcattggctttttcagtgttggtttttagtaactctcgatttattaaaacatttatacatttatagctttgtttatgatgtatacatttataaccttgtctgtgatgcagatatttttccaatttgtcatctggcttttgaccttatctgtggtattctttgacaatacaaaaattttaatttatatctgatcagtttcatccagttgtttttttcttttttcatgatttctgagttttgtgtcatgcttagcaagatgctctctactctgaaattattttctgtaaaatatttttttcagccaggcatagtggctcacacctgcaatcccagaactttgggaggtagaggtggaaggattatttgagtccaggagttcaaggccagcctgggcaacagagcaagaccccgcctctattttttaaaagagaaatttttttaaaatactttttcccatgttttgtttgagcacttacattttcttaacttttttgtcgtgaaacataacacatagaaaaatgtaatgtaagtgtacaacttcatgaattgttataaattgaacatatagctttctggtactttcatggtttaacttcttacatttaaattttggtttcatctagactttattttgatataattgtgaaatagaaatccatttttattctaaaagaacactttttaaatgttcatgaaatgttttaaaatttattatataccaagcaagaaaaaatctcaacatagtcctcaaagcagaaattgcacaggacttattctttgtacagtgtaatgcacaaaaactaataagaaagccttaaaaacaaccctttattaaattactccattccaaattataatttcaatctacttagcacataagtattgatatacatttatcgaaattggccaaaagtgttttattattttttaaaagaaaaagcctagcaatggcttaagcaataaagtttttaattttaaagaataacaaacagcctcactaaatcagaggaaagaaataaaaagataaaagcaaaaattacagaactagaaaagggaccattccagcaaaattgataaatgaaaacaaaaatttgtttttcaaacataagagttaccaacggctggtgaatctaaaaagaagaaaaaacaaagtaaactaaattaaatgtgaagccatgaagagatttaaaattataagaaaataggccgtgcacggtggctcacgcctgtaatcccagcactttgggaggccgaggtgggtggatcatgaggtcaggagcttgagacccgcctggccaacatggtgaaaccccgtctctaccaaaaatacaaaaattagctggctgtggtagcatgagcctgtagtcccagctacttaggaggctgaggcgggagaatcacttgaacccaagaggtggaggttgcagtgagccgagaccttgccattgctctccagcctgggtggcagagtgagattccgtctcaaaaaataaataaataaataaagctgggcgcagtggctcatgcctctaatcacagcactttgggaggccgaggtgggcggatcacaaggttaggagatcgagaccatcctggctgacatggtgaaaccccgtctctactaaaaatacaaaaaatgagctgggcatggtggcgtgtgcctgtggtcccagctactcgggaggctgaggaaagagaatggcgtgaacctgggaggtggaggttgcagtgagctgagatcacgccactgcactccagcctgggcgacagagtgagactccatttcaaaaaaaaaaatacaagaacatattatatacaactgtgagctacaccatgtttgaacatcttgacaaaatgagcaactttctcaaaactaaattgccaaatgttcatttttaaaaagccaaaaataaccaaccaacacaatgaggataaatttaaagtgatcaagtttgatttttttaaaaaactgttcaaacatcttggtagtgctgggcaggaagttggctttcattctgggtgagatgagaaggctctaaggggcataggacctgatgtcatgggacctgatgcaggctctgtcttaatagctgactcctgcgtggagtaggttattgggggatgggtggacagagaccagggaggaggctggtgcaggaatcccagtgagaaatgatggtgtccaggctaggccatagcagtagaggaagcaagattctggaatgcacttggaaaatgaagccatctttgggcttgagctcaaggaagcatgaagctgcccctaactgaagtggggaaggtggtctggggagcagtttaggaggagagatcaggagctcagtttcggacttggaaattttgaaacgcacatgaggcatccaggtggagttgggagaattaaataatgctgaaaggtactcacttggcaagtagcaaatattcgctatattgtctgttcaactttgtcaactgcttttccagtagaaatgtagtgtccttatcacacatgcataaatgttaaactcaaaagtaaaatgaaatattttctcagtagatatgaataactttttaatttttttgttttttgacatgcggtctcactctgttgcccaggctggagtggggtggcgagatcatagctcactgcagcctcaaactcctgggctcaagcaatcctctgccacagcctcccgattagctgggactacaggcacacaccaccacgcccagctaatcttttattttttgtagagactgagttgcacaatgtagcccaagctggtctccaactcctgagctcaagctatcctcccacctcggcctcccaaagtgttgggattacaggcgtgagccactgcacctggctgctttttaattgtaatattcatcctccatccatcatacttagtgcaaatatttttccccacctattgccttcctatttctcttttatttcacgtcatttagggaagtttcatttttttgtgagctatcactgataatttcttatttactcatcatcttgtatttctcttccttacacattggggaaatgtctattctagtttttaatgtaaatgttcttgtggctttttttaaaaaaaaatcaaaatgtgcacattaaaaagtttgaatggttcaaagggtcctaaaaagggtccacagtgggaaaggctctcctgtcccagcaggcccagacccctcctcagacacaagcctgtcatcagtttcctgtgtagcttcccagagttggtctctatgtatgcaaatacacacacatttaaaatatacacatgccacagctttttaaaatttgaatttatgggccatgtgcagtggctcacgcctgtaaccccaacactttgggaggccgaggcaggtggatcacctgaggtcaggagttcgagaccaacctgaccaatatggtgaaaccccgtctctactaaaaatacaaaaattagctgggcatggtggtgggtgcctataatcccagcttctcaggaggttgagacaggagaatcgcttggacccaggaggcagaggttgcagtgagctgagatcgtgccactacactcaagtctaggcgacagagggagactccgtctcaaaaaaaaaaaaaaaaattgaatttagactcaggtgcagaggctcacgcctgtaatcccagcacttacggaggctgatgaggggagaatcacttgagtccagtagttcaagaccagcctgggcaacacagggaaactatgtctctacaaaaaaattaaaattagcctggcatggtggagtgtgcctgttgtctcacctactcaggagggtgaggcaggggaatcacttgaactcaggagtaggaggctgcatgagctatgattgcaccactgcactccagcctgggtgacagagcaagaccctgtgtcaaaaaaaaaaaaaaagaaaagaaaattagactaccatcatagatggtacaaacacttcccagtttgttgctttcgttttgtttgttgccatttttactatacagaaaaaaaaggcaataaagaatacattattataatatgttaatttctactgcattatttttaacaacttcattgaggtgtaatttacataccgtaaaatctatccattttaggtgtaggattcagtgatttctggtaaatttactgagttatgtgaccatcaccacaatctggttttgggacattttcattactgccataatattcctcaaacccatttagaatcattcctatttctgctcccaggcccaggcaaccagtaatctacttgctgtttcaatagatttgccttttctggatgttttacataaatagaatcatacaatacgtgatctttagtgatcttttttcacatggcataaacttggttcctttttatgttgaataatattccattgtatagatatgtcacagtttgtttctccattcatgagcttttgggtatttgggttgatttcactttttgactgttatggataatgctggtacaaacattcatatacaagtttttgtgtagatgtatattttcatttctcttggaatagacctaggcgtggaattgctggattagatggtaattctattgttttacattctaaggcaggggtccccaacccccaggctacagatcagtgtcggttcatggcctgttaggaactgggccgcacagcaggtggtgagcggccatcgggcgagtattactgcctgagctctgcctcctgtcggatcagcggtgccattagattctcataggagcacaaacccagttgtgaaatgcgcatgtgagggatctaggttgcgagtttctgatgagaatctaatgataaatgtaatgagcttgaatcatcccgaatccatcccccaaccccaacccccgtccggggaaaaaatgatctctcatgaaatcagtccctaggccaaaaagtctggggactgctgttctaaggaactgccaaaactgccaaactgtttttcagagtggctggaccattttacattcccaccggcaatatatacggtgtcctgtttctttacatcctcatcaacatgtgtctttttcattacagccattctatgtgggtgtgaaatgctatgtggctgtgtttttcatttccatgcagaaatttttaatttaattgcttagttaaaaataattctttaaatttaaaacactcatattgccatatgtatatttttatactacaaagtgatacaatttttgttaattttcttgccttgattactctttacctgtatagtatttaaatctttacataagatcacaattatagtgaatagtaatttattcaactcaaaatcttcataggatttagaaaatttaagtcctttaccaaagggattgacttytaacttcattaaaggttgcgaacagtatcaaatccttggtaaagccacattcaatctttggcactccaggattttgagctataactgtagtgatcactaatatgtcatttctaagctgacggtcataatgactaaaacctctcatagattttaaaatacttccttcaaagtcagtaaacattccaagttactaagctgttgaacaatttcttattttgaagattttttctgataagttccaaagtgtttctgatgaaggaaataaaagctgtccagagaaatctgagtcattgaggtgagcacagattccattggctgcttgtgctttcatcattacagtacaattaacttcagaagtcgagagatgctgcagaattttaagtacccaaagtttctcaacaagttgattttcaagcaaggtcattaactgggccattgtttttgccaatcctccaacttcagccatttgaatcttgtatgatgaactcacttgctggtaacctggaatatgctcctttggtggttgtgcctgataaaagtcaacaatacgtttacaattttttatcctcaattcagaacttggtattttcattaagtcacccagaagcgcaactgaactagcagtatctccagcataagttatttcatccgatactttctttttcaaaaatggcaagccacactattttatgatatcatatgcagattctacaaaatgcggctggttttcaatttttactgcacacagattcagaatttcaaatgtctgtactaaatcccttaagggaagttcattctgataacactgtaccagtttcttgacagatttaagttgcttttcttctaagccttctttagcagtctcttcaaaaagtttgatgacaccattaaggtccacaggcttcaaaacaccagttccacatggcgagggaggccttgggaaacatcatcatgatggaaggcaaaggggaagtaaagaccttcttcatggtggcaggaaagagacagcatattgctatgtattttaacaccacttatttccccccttttttctttcaatatcatggattaaatagtgtattttaaatgagtgtgaggctcacttggactctattccatccctttggccaatttttttccatttttaatccaagaatcttaaagtttgaatgatggtcaccttgttatatattttattatgtttggaagcttttttgctattgtctgatcctcccaacaaatagccttttgatagaattgcctttattcgtttctttatatctaattctaacttaagattagacttaaaagtaacttcagcggttttattatgaaatatttaaggcatataaatactgcctcttttctctaaatgactgctaatataattttaccaagttctgttaaagtatcctgttgtacataaagtgctgttgttttttatctgcctgttaacttagagtgggttttattttctttcactttctgtggtcgaaggcaagtatgtcttagtcagtttgggctgttataatgaaacactgtagactgggtggcttaaacaacagaaacttgtttctcacgttctgaaagccgggaagtccccaatcagggagccagcaggcctggtgtctggagaggatgcgcttcctggtttgcagacggcaccttctcattgtgtcctcacagggcagagagcaaaaagaaagggcaagcgctctccagcctcttcctttttcctttttttttttgtttgtttgagatggagtcttgctctgttgcccagactggagtgcggtggcatgatcttggctcaatgcaacctctgcctcctggcttcaagtgattctcctgcctcagcctcctgagtagctgggactacaggtgcctgccaccatgcctgactaatttttatgtttttattagagatggggtttcatcatgttggccagactggttttagactcctgacctcaagtgatctacctaccttggcctcccaaagtgctgggattacaggcgtgaaccaccgcacccggcctccagcctcttcttgtgagggcagtaatcccatcataaggggtccaccctcttgacctaatcacttcgcaaaggtcccacttccaaataccatcacactgggtatttaggcttcaccaggtgaattggtgggggaggtgggacacaaacattcagtccacggcaagtttttatctcaatttgctaaagcctctctttatttctcctgttacagtgtgataatgttttttaaaatatcatttagctggctgtggtgacccatgcctgcagtcccagctactcaggaggctaaggcaaaaggatcacatgaacctaggagtttgaatccagcctgggcaacatagaaagaccctgtctcttaaaaaaataaataaataaataaataaataaataaataaataaataaataaaggaaagaggctgggcacagtggctcatgcctataatcccagcactttgggaggccgaggcgggcagatcacctgaagtcgggagttcaagaccagcctgaccaacatggagaaaccccttctctactaaaaatacaaaattagccgggtgtagtggcacatgcctgtaatcccactacttgggaggctgaggcaagagaattgcttgaaccagaaggtggaggttgtggtgagccgagatcatgccattgcactccagcctgggcaacaagaatgaaactccatctcaaaaaaaaaaaaaaaaaaaaaaagaaagaaaagaaaagaagcacttaaagaggctgaggcaggcagatcacttgaagtcaggagttcaagaccagcctggccaacatggtgaaacctagtctctactaaaaatactagaattagccagacgtggtggcacatgcctgtaatcccagctactcgggaggctgaggcatgagacttgcttgaacctaggaggtggaggttgcagtgagctgagaacatgccattgcactccagcctgggcaacagagcaagactccatctcaagaaaaaagaaagagagagaaagagaaatatagacatatgttattagtcccccaggacctcttcaaaagatctctcttttcctttcttatttctaattaccatactacataccacctccattatgtcagaatgtgccctatttacgtggatttgtctaaagtcatggaactctgagttacattccycgtatttcacagagacacaatcagagcacacgctgatcttccgcctctcttcatttcctccatgtactctgtagctacctgttctcttctttgttcgtaggaagatctctgttgcgtggtgtgggagtttgtgccagctcatctttttattgtgctttctgtgagcagctatcaatgcctccaggtcttctctttaagaagaatgtttactctcaattgtttaaaaaactaactaaataggaagaagattgcaaatcctaacctttttggggttttatattgggggcaaaagttggcatctgcagtaaggattatttcattttcatctgaataaatgagcagtaataactttgctgacttgcagggctcattgtgatgccaaaggacattgtaaggtgcatatctgaattggaggaggaagaggggcatcctctgagccaggtgtggcaggaggtgacatcaaggagggttaggctgcgtaaacccagggacacaaggagctgcagtcggggaagaacaaggtctagcggatggagttggggggactgtgtctggagccaatgttctcagatgtgtctccggcaggcaggggcaagggctggtgcctggtttacagcattccttttggagtctggaatagtggggaaaactccctgtcttctctccccttaggagtctgcactatggaaacaacctgtcaatccagctcaaggcacacatagcccagacacccatgagaccctctccgtggggaccctagagcacctatcatgaacgaggagaccaagtaggtgatttttctctccccttcacctcctcttttcccctcctatctacttcgtcacttttctcctactgccaagactggtccctacccaaatctgccttactgggctgcccccaacacaacaaacctgcccttgaccatcattcagcatgagaatgtaatgatcagacacagaaaatcaggaagagttttgagacagcatctaatctacccattttagagatggtatgactgaggcttatataggaaaaaggcttgctcaaggtcacactatgagtgtatcagctaggataggccaggttacactgtagtacatgcaccctccaaagtcccagtgactcatggcaacaaaagtttatttcctgctcttgcttcctgtctcgtgtggattgactgggattgctcctccacatcatcctgtctcccacactcaggctaacagggtagccatgatttgcaatatttctggtccctggagtagaaaaaaagaaaaagtactgtcaattacaccttggttcttaaaacaactacaggcatgacatgagtcttttttagcatgtttcattgaccaaagcaagtttcatggctgtgcccaatttcaaggaggcagagaagtgtaatcccaccaaaggcctagaaagaggagaaagagtatctgtgaacagccctaatgcctaccacagagaattagtaacagagctgggccatggatctttcaaccatcgtcctctgtctccaagattattccccatggaaatctcaatgactgataatgatgccatgtgctttttctcctgaggatggttagccttaaagagatttgtgtcatatcctaaggggatagaacactaatgatggaaacaaaggtattgtgttagactggctggaggagaaatttgaggatgagaaacatcaccagaaatcacaccatccaggcactacttacttccatctggtgccatgctgccctggaccatttcttcatgggtagcatggatgctggacaccatagcctggaaaagaagttatgccctaggctatggccacatccttttgccgagatcacacaaaatccagggacttagccttgtctggtgccatctaggcctccaaggccttggaaatttactggcctgggaggcaagaaacctcagttctcctcctgcctctgtcatggacttgctgtgtgactgtgggcacaccctttgcccttccttggccatggtctttccgtctgcttagtggaggtggtgatccctgcctgaggatcatggtgtgagcatgtttcataaattctaagactctctgcctgagtgaggacctattgctattagcccagttgaggagaaatgaccagtggggctgacagtacatccaagtatgtctctactgcatgcccagggagcagctgggctctaaaccccaggacgcatagtactggcctcagcctctgggaattgggaaggctggcttctgggtggacctcctactcttttcagagttagaggtggactctctggagttgtgaggataaaataaggtatataaagcacttagacagtgcctaatacacagtgagtgctttccaagtgtgtactgctatgaggaaggacatagtaccagaaagtacatccggaaatgtgatagcatagtccactagatgatggaccaccatttagttggccaatccccaactgttggacatttaggttgtttccaatttttaataattataaataatcttgcagtgagcatctttgcaattaaatattgtatatacgttcatgatcgtttgccaaggttagagtcctagaaatggaattactgaatcaaaggaactgcacattatttaggcttttgctgtgtaaatgccccgtgccctctattggtacttctagaaggaggtggtttaagagttccagttcggccatcatgatggctcacacctgtaatcccagcactttgggaggccgaggtgggcagatcaccctgaggtcaggagtttgagcccagcctggccaacatggtgaaaccccatctgtactaaaaattacaaaaattagctgggcattgtggtgtgcacctgtaatcccagctactcgggaggctgaggcagaagaatcgcttgaacccgggaggcggaggctgcagtgagccgagattgcaccattgcactccagcctgggtgacagagcgagactctgtctcaaaaaaaaaagagttccagttcagaagggaagaatttgcttagcaaaagaggtgatggtctgtgttagctaggattagagttcactgtgagtagcagaaagcactaaacaacagtggcttaaccagaatggaagtgtatttccctgccatgtaacagaagtccaaagtcagtgagcacagggcagatgggcagctttaccttccaccttcctcagtatgggttccacctcatgattcaatatggctgcccaagatccagccatcccatcaacaatccagacaacaggaaggagcaaagaagaatagacaacatttctacttacattccactggccaaattacatggctacatataactgcaagggagactgggatataataatctattctagatgaccagagaatatttagtagttctaatactgaggaagaagggaagaacagattttgggagacaactagttgtctctgccatgaggttagctcagactgagagcagcataaatggttcatggaaataagaatgagtaatgcatcctcacgggactgtccacaggggatgaacaagaccattccagagagccagggtgcaggcacaaatggagtagggagggggtgcagaagaaacagactgatctctggagctgatccctgggcagagacatcaagactccatggagaggccacttccctgcctattttatgtckctcaaatgtagggactggttcttgactgcttgacttccctagaaactcccttatcccccaactcaccttscccagatcaccttccccctagttcatctgtaccccactcacctgccctcaggtcacctgccccacaactcacctgttctccatctaatcttcctcccagctcccctgtcccccaaatcacctgcccccaatttgcttgtcctccagctcaccggttccccagctcatcttccttccagttcccctgtcccccagctcacctgcctgccctcagttcacctgtcccccagttcatcttcctcctagctcccctgtcccctagctcacctgtgccccagctcccctgtcccccagttcccctgtcccccagctcacctccccctcagctctcctgtcccccagctcatctgcccccagtttacctgtcccctagctcacctcccccccagtttacctgtcccccagctcacctccccccagtttgcctgtcccccagctcaactccccccaagttcccctgtccctcagctcatctgcccccagtttrcctgtccccctcaactcacctatcttccctgtccctccagggctggctcctcatggaccccgttggcctccagctcggcaacaagaacctgtggagctgtcttgtgaggctgctcaccaaagacccagaatggctgaacgccaagatgaagttcttcctccccaacacggacctggattccaggaacgagaccttggaccctgaacagagagtcatcctgcaactcaacaagctgcatgtccagggttcggacacctggcagtctttcattcattgtgtgtgcatgcagctggaggtgcctctggacctggaggtgctgctgctgagtacttttggctatgatgatggtaagggcaggtgtgagagacgcaaagcagccgggccagtacctgcgtcatggggagccgggaggagcccagggacccacctaagtcagagagagggtgtagcccagccacgatctcaactctatatttctggacacttcccagaacaaatttcctaatgcgcccaaatctgctggggcctggaggacccctccttctacctggcttcactcgaattgctcgaattgctgagtgactgcttccagccacaaaatcccacatagcccataatgcccgagagatttatttcttcttttttggcgggggtgggggggtgttttttgtttgttgttgctcttgttgggttttgtttgtttgttttttatttttgagacaaggtcttgctctgttgcctaggctggagtgcagtggcacaatcatagctcactacagcatccaactccaggactcaggtgatccttcccacttcagcctcccaagtagctgagactacagtagaactataggtgcatgccaccacattaggctaatttttcattcttttgtagagacaggacatcactgtgttgcccaggctggtcttgaactcctggccttaagtgatcctcctcccttggcctcccaaagtgctgggattatagatgtgagccatcacacctggctagaggtgtttttgtttgtttgtttgttttgcaacatggtcagaaacagtgacggggagcgccttctgccctctactgatccgtggggatttcttgggcaccttctgtttgcacagcactgaggggaaacacaggacattgaggggcaacagcgtttttggagagaaaatgggaactcacttaagaaccctacttcaaggcagagtgtgggaattgcggggggcggggcggcgcatgcacatatgtgcagacatatgcagatacacacagtgcatatacatgtgggtatgtgcgtaaacccatgtacacatgcatgcaagtgtgcccacatgcataacacatgcatgcctgtgcacacacatacataaacttgcatgcacttgcatatacacacatttctgcccagcactgccttcaaagctcaccaccacattttctccacaacagataactgagtgttccatttagttctcccttgctgggtatctccctgtgagatgagccctgagccaggcgccaggccagagctggtccccagcatccctcgacagccccataccacattatactctcccctctcttgcagggttcaccagccagctgggagctgaggggaaaagccaacctgaatctcagctccaccatggtgaggactggagttggggggtgggaagggggtggtgagcactgtgaagtccccacttccaagctggaggaggctgtggaggctgtggtggctggtcacagccatttctcataggccatgctcttcgtctgtccctgacccatttgcaagtgtgtcaagcccctaactgtgtctcccagccccacctcctcctgcagtgactttcaaggctttagcttgtcccgttaccaattctmaagggtctaacctggaacccctcaggaagcctgttctcactttcytgcccgcaacccgcagggcctcatctcccagccccaaagtgtcaggcttcatggggaagccctaaycaccccctcccgacttgtacaccttggacttgacrctcacccacagctgctgtcttcagcgggggagcctttggctgattttctgaaggagctcggaagggccagtgattaaataatgaccacctactgattcgtgggtcacactttcatctcagcaccttgatttctacagaagcattgactttacttatcgctgtgcatggcagtaatgccaacagaaaacccaccctataacctcagctccccagtgaatcaaaactgtccaagtccctggtccaataggcccgcatcactgagctggcatcattatctcatggctgtaaccagatctgattgatatttggccagtgagtccctttttaatataggatttgttaagatattgaagtgctctcgaactggttccagcctcctagctggacaaggagcccagggccctgctccaggggctgttcctattggtcacttagcttagctgtaggaggaccctgcttgacttcttaaaattctttcctgagtcctctttcctttctccctcccttcctttctgggtccccttccttcttgttttccttcttcctttctcaaactcttccagaaaggcattaaagtgattgttgaaaatccatacaatgagacaagactccagaaactattaagggaagtgaggaaatgtgggtgataagaaatcgggatgataaaaccctaacagaggagggaggttgcaggcctggccaaactcactgggaacttcacttatatgaccaccggcggcttccatagagcttggtccttccctgatggacagatggccatttagtgcttggagctgagtgtttctrggggctgctggctgtyggccctgcttcctgcatcctggactgcaagactgccaggcccagaacatccaccttccaatgggggtgcctagaagtccactctgcaaatagaagctggtgttgacccagcctctgcctgctgcctgcctttccagtccctgcatgtgggtgtacttggctgcctgccacctgtctgtggactggakttccccaaaggttctgggtaacccctcagcccagrtccccagaccccactcctccaccccttcctttgctttttcaggcctgaagcgcccacatcagagctgtgggtcctcaccccgccggaagcagtgcaagaagcagcagctaggtgggtaccagtgtggggaggaacataaacagagagatggggttgcctgggggccaagacccggaccctggaccttgtcccctgccaataagcctccagaggcccagtgactcttgtctcgcaagtttccaggagaaaaggactggaggtcttgcacaggcagaggagaggcctgggctggcagcgaaggggctccccacccatctggctgcatggggacttctctgaagagggctccgctgaaggagctggaagcaccatacaggtctcagcttcgctgtccaggcttttccagggacaccctatgtcctcagtgttgaaggagacccagggaggagaccagtttgggggtgagcagggatggggaggggtgaggaggcctgggagaaaccttcaagacagaggccctgggggcccatggggagacatggagctgcttagggcaggccaggccagtgagagaagaaaggggacttctctcattcttgaccagttctcagaatggtcctcgttctccacgagttgtcccactaactagagccttctctgcccccactgctgccaaccatggctataaccagaggattcacatccgctcaaaatagttcactaccttggcctttccccatagggttcccccaaaagcagccccagccctttccctgggtcacctgagacctctcaatgacccaggaattaaaaggttaacatctggcactgtaggggcccagctcccacagttccgatcggtaatgcctaggcctacaggttgttagtgctcacccctgggcattgcagaactgaaatattgggaagrggcactggggatccagatattacagaaagaggttgtttcaataagatattgcaaagtagctgggcgcggtggctcacacctgtaatcccagcactttggagggctgaggcaggtggatcagttgagcccaggaattcaatactagcctggccaacgtgacaaaaccttgtctctactaaaaatacaaaaattagctgggtgtggtggtgtgcacctgtagtcccagctactcaggaggctgaggcaggaggatcacttgagaccaggagtttgcggctacagtaagctaggatcgtgccactgcactggagcctgggcaagactgagactctgtctctgggaaaaaagaaaaaaaagagatgttgcaaaggaggtgccctattcccctccccccatcttactgamcccttacaccacgtgtactattgcagaatggatagaaccgtgacccacacttccccattcccacctgcctgtttaaatagctaccggagagcctatgctcccttagaactgattccttctggaagttggggtggcacagatccccctatggtgctcttgacacccccaccctcaccccatcatacatacacatctggggctacaggctcccaacagcccaatactggggcaagaagacatgagcagagggccggggggtcctctcctcatgccatgtccctgccccttgcagagttggccaagaagtacctgcagctcctgcggacctctgcccagcagcgctacaggagccaaatccctgggtcagggcagccccacgccttccaccaggtctatgtccctccaatcctgcgccgggccacagcatccttagacactccggagggggccattatgggggacgtcaaggtggaagatggtgctgacgtgagcatctcggacctcttcaacaccagggttaacaagggcccgagggtgaccgtgcttttggggaaggctggcatgggcaagaccacgctggcccaccggctctgccagaagtgggcagagggccatctgaactgtttccaggccctgttcctttttgaattccgccagctcaacttgatcacgaggttcctgacaccgtccgagctcctttttgatctgtacctgagccctgaatcggaccacgacactgtcttccagtacctggagaagaacgctgaccaagtcctgctgatctttgatgggctagatgaggccctccagcctatgggtcctgatggcccaggcccagtcctcacccttttctcccatctctgcaatgggaccctcctgcctggctgccgggtgatggctacctcccgtccagggaagctgcctgcctgcctgcctgcagaggcagccatggtccacatgttgggctttgatgggccacgggtggaagaatatgtgaatcacttcttcagcgcccagccatcgcgggagggggccctggtggagttacagacaaatggacgtctccgaagcctgtgtgcggtgcccgcactgtgccaagtcgcctgtctctgcctccaccatctgcttcctgaccacgccccaggccagtctgtggccctcctgcccaacatgactcagctctatatgcagatggtgctcgccctcagcccccctgggcacttgcccacctcgtccctactggacctgggggaggtggccctgaggggcctggagacagggaaggttatcttctatgcaaaagatattgctccacccttgatagcttttggggccactcacagcctgctgacttccttctgcgtctgcacaggccctgggcaccagcagacaggctatgctttcacccacctcagcctgcaggagtttcttgctgccctgcacctgatggccagccccaaggtgaacaaagacacacttacccagtatgttaccctccattcccgctgggtacagcggaccaaagctagactgggcctctcagaccacctccccaccttcctggcgggcctggcatcctgcacctgccgccccttccttagccacctggcgcagggcaatgaggactgtgtgggtgccaagcaggctgctgtagtgcaggtgttgaagaagttggccacccgcaagctcacagggccaaaggttgtagagctgtgtcactgtgtggatgagacacaggagcctgagctggccagtctcaccgcacaaagcctcccctatcaactgcccttccacaatttcccactgacctgcaccgacctggccaccctgaccaacatcctagagcacagggaggcccccatccacctggattttgatggctgtcccctggagccccactgccctgaggctctggtaggctgtgggcagatagagaatctcaggtgagtaagagtggaggaggaccggggaggggattgggcttttgggggagcagaggccaaccagtctagcaaacctctgccaagaggactggataagaatcttgaatatcagaacataatggcctgcaatgcaagagaggaagctccataccttgacaggacctctggagtccaaatggatcctcctcttgtctgtggtttctggactctcagtctctctgtcaatcatgggctgaaaccacagatccaggctgtctayagaggctggtggactttgggcaagtatatggagcacacacatgcacactgtctaggccagagtttcttcgttcctaaaacgaatctgtaacaatagccaactcatatggtcattgcaagaatgagatgggatggtgcatgaaaaacattttgtagcacagtgcctagcacagagcaaaggctcagtgtgcatattagctagagaaaaggctaggctgcagtaacagagaaacctcctccccaaatacagtaggttaaataatgtagaattttatttctctctcatggaagagtcagaggtaggtggtccaggtcagtggaatggctcagctccacgcagtcatgcaggtacccaggtccctcccattttgctccattatccccttgggaatcctatctgcacagtcaaagctacgtcatgggtatatctgtgctctggcttgggaacaaggaaagagcatggaggaacatgtcaatgcattaaagttcagtcctgaaactaggatacatcccttccactcacattccattggtgagaacatagtcacctggccacactgagctgcaagggaggctgggaaatgtgatctctggctgggaaaccatgttcctcatgatagctctattgctgtagatgaagtggagaatgggctttggtggacgattagaagtctcggccataatatgtatttgttagtactactgtattaagccccatctctctgaggggatggcgatgacttctcagctctgcccagcactgatcctctgacacttcgcttcttcttatggcagctttaagagcaggaagtgtggggatgcctttgcagaagccctctccaggagcttgccgacaatggggaggctgcagatgctggggtgagccaggccttggagctgagaagggtcttcagctggggatgcctggtactctcctccctctccttaatcctacacaaggcagattcctggccccgcccttttcccctcctcgttcctccccaccatctttgcttactctgtaggttagcaggaagtaaaatcactgcccgaggcatcagccacctggtgaaagctttgcctctctgtccacagctgaaagaagtcaggtgagtgatctccaggagggctcactgactggggagatgagccactgcccaggtcccagagtccccctggggcctgcatgttcctccaagtctgaccagtagtttttcagtgagacccagagagggaaggcatcagtccaagtactcagtagggctgagtccaaacccaaggctcccagagtccccagagcaaggcttccttcatctaatattttagactgtcttggaggagcatgagtgttaaggctccctccctctttctgaaatcccaggagaagggatagcagtgcgtaggcaggaatcaggcactgtgggtacacataactacatgaagcaccacacaccttcacatttgttcacacatgtctacacttgcacagaagtacacaggcatatgcaagaatatgcacccacacatgcccactcataggtgtgcacatgtatgcagcgcacacatgcacctttaactacatgtacacattttgatgccagcacactctaactaactaagcttgtatgcacaaatatactcctgccctgtgtctgggactcagtaccatggggaggagtgggaccagtgaccctcctccctggcagaacgctgctagtttatatggcacctttatgacatttagagaaggcaccacttcatccacacagatgcagcctgtcactaaggttcagcacttgttgagtgaaaataataagttggaccacagtccctattgtcgtctcggctgggcatctgtgaaccgtgattaagccaaggttcagaagtactgaacttgttgacatttttcttccctggctattgaaagtgactttaattttgtctttcatcacccaccattgttcttaatcaccctcactcccctcaactcatctgtctccccagctaggaacccaggcaaggctggcttgtgaacaggtggggaaagtgaggtcagagaggaatgcgcttggctcagggctctgggtgagtcagggccacagccgaggctggaagcgatgtctgcagcgtcccagtctagactttactcattgcctggggggcctatcccaggcacatcccaggcataagccctgggagcagggtgctaggtctcctcattgtgcctcatgaagaggccgtcagtctgtcttctagatcccttgagccgccaggcaaaaacttccccataggaacagaatagacccagaattgaggccagcagagggtctttcctcctagccgtgcctgctggaatccggcgagcaggccatcagctctttctgggcccctgtcttatgtctcccacatgagggtggccatcctgtcacttgctaactggggcttgcaagtgccccaaccccagggcaaagggactgggccttggtctcctcgcagttttcgggacaaccagctcagtgaccaggtggtgctgaacattgtggaggttctccctcacctaccacggctccggaagcttgagtaagtgatctttccactgcctctgcagcccagtccctctctatacctgattcaccccactcccttgcaaggcaaggaaggtctggggcccctggggtaggggattccactcctgacacctttgccacaatcttgcagcctgagcagcaacagcatctgcgtgtcaaccctactctgcttggcaagggtggcagtcacgtgtcctaccgtcaggatgcttcaggccaggtgagcagaaggaaagggatcttggccttatgggccttgagaaaagaggaggggaaagtgggatgggaaatggaggaggcccctcgtctgcaggataaatctgtgcataccctactgttttactcacagctttaccttcagaacctagctcaggcttggcacctggtacttggtatatattgaattaatggatggatgaaaagatggatgtatggatggatggctgaaaagatggatgggtggatgaaaagatggatggatgaatggatggctgaaaagatggatgggtggatgaaaagatggatggatggatggatggatggatggctgaaaagatggatgggtggatgaaaagatggatggatggatggatggatggatgaaaagatggatgggtggatgaaaagatggatggatggatggatggatggaaagattgatgggtggatgaaaagatgaatggatggatggatagatgaatggatggatggatagatggctagctgaaaagatggataggtgtgtgaaaagatggatggatggatggatggatggatggatggatggatggatggatggatgaaggaatgagtcaacaagtctacgaagcacaggcatagccaaaggaataattagctgtgtgttgccctccatggtgctgaaccaatatagccagttttgatcatggggtaggttaggtgtcatttttcttactcataaaaatttctattaaaaaaaattcagccgggctcagtggctcatgcctgtaattccaacactttggaaggccaaggcaagaggattacttgagctcaggagttcgagaccaacctgggcaacatagtctctacaaaaaatgaacaaaattaatggggcatggtggtgcatgcctgtggttccagctatttgggaggctgaggtgggaagattgcttgagccgtggaggttgaggctgcagtgaggtgtgaacacaccactgcactccagcctgagtagcagagtgagatctccatctcaaatttaaaaagaaaggaaaaaaaaaaactcacaacattcttaatttttattatatttcttgtgaaaattgtttttctgactttttaaaacactcttgcaggattcatcaagcaaagacataatcagtatttcacatgcctgatttaaaacacttttgctagttccgttatgtttccctgtcaattgcaaaatcagctttatctggatgtttgaacatttggggcagaaaagggtgtgcctgtggtgggtgatgtgctggtttccagtctctgggtttcatggcttggtatctgatcctgcagggaggcggacctcatcttccttctttccccgcccacagagacaactgcagagctacaaaggtaagaagccaagaggcggtgggcctggggccatccttagaagcaacttgggctcaggcagttgaggggaaaggtgaccaagagactaggaagagctggggtatgggaattcttcctgctactgctgcactgaggaatgaattactgcttaggttggcaaaggattttaacttcctctagygtgtccagaccacatctggtccctgtggaaggaagcatccccagaagactcagaggaaggcaaacccttggggagaacataaagatactgttagactggcattactagatggtgaaaactctggaaaagcccttacaactgaaaaaagacagggagggcaattatggtacctacatcttagggttgttctgagaattaaatgagttactacacttaaggagtttagagcactgttggcatgcagtgg

SEQ ID NO: 2 - DNA, 134000 bp, Homo sapiens
tgaggagcttgaccagccctttaaaccaactcagcaagtctgaatgatgtgcaaagggacaattagatatgggtaagaagtccccaacctcaacccataaaggactgtgtctgaggttcttacagcatcaagggagatggataccatggcttccatcaaggtgctgctagtcctgctctcaaaggctttggtgaccctgagctctgctcagagcatagatgatggcaaraggaggaaatggggacaatacaatggataacggggttaaaatgcatggaaagtactagagttagattgaccctttcagaaattaagcactttattttcagagagtaggtcaataaaagaggaggaaaccttaatttctrtttttcactgattgcagatacttctctgaaaatctcggcctaagtcttaagtcaacgtcttcatgatgtaattttgccgttctaatgtatatggattttcagttgttgattctgtttgtgtgaatcagggcatctaaattgaacggaaaatctatatttttcatttctataatctataatagaattctataattctataattcatctagatatcrcatttccttgacatcaaactcttgaacatttaaaaatattgataattttgattaaatttgtacttaatcaaaattttgatgctaagcaggcactattaaattctttctattccattccttaatcctttaaaatacaggtcacccctcattcagagtcaatgattgggactagggttctactttgggaaactttggtttattgtatccaaatctttataattttttttccctaaagctctcttaggcatttttaaatctcttgtgtctaaacctaagtgtctttctagaaattcacagctggggttttatcaaatcatgttttaaatttgtcttctttttcatttttttttttctcttaaaatcctaagtactgttgctgaagagttctttcaagagtaaggtaaacctttattcagggatgtgttcttttctttgttcttcagaagctaccatagttttcttttttgtttaataaacattctcaaaattctcaaacattctcaaaattgagtttagggagtcccaaagggaaaaagagaattacaaaatctgaaagttttagtggttctcaataataacattgattgattgagacaagcctcctctgtcacccagattggagtgcagtggcatgaacacagctcactgcagcctccacctcctgggctcaagctatcctcctacctcaccctcctaagtagctgggactataggcacacaccatcacacccagctaattttaaaattttttatagagatggagtctcaccatgttgcccaggcttgtcttgaactcctgggctgaagatatcctcccacctcgtcctcctgaagtactgggactacaggcatgagccaccatacttggcccaataatgttaaatatggaccatctccttcattttcacattagaatctcttgtgtcagagttgtaattagcatttgaacatcagcagaatatagacacagtacttatttgtaaatgcttttctctaaatctttctacaaccaatggctaatgattgaataacacaaatctcccatttttgcaagagcaataactcccttgacatataactaatttgaagcataaagatacataaaatttgcctacattattgtagtcaatcagtgaatgtatcattgcactttcttttgccactctgaattaaaacacaaatgcttcattctttagttttcaagtcctgataactgcttaaacactaatttgtcacagagtaagtgaaatttaaagccaccattagtcacacacagtttacatgaaaaatttgaagtccattctaatggcctggggagagactctgtgtaggaggaaggatataatacatgcccagagtacatgagagagctaatgaattatgccaccaaagaagtggcagaattgagtaagtgagtcaaccaacaattttgttgttcaaagaaaacttttatgcttaatgatttttttcccctgtttctgacttgtcaatgacccttctactgagtttatgatgtcatttcaaacttcattctttttctcttctttctttgaaggaggctttcaagaggaagatgaaaagacctaactaccatgtgagctattttgagttcaattaagttattaagaattgttctaaatggattcaacgaacctctgggttactgttctaataaaacatttctacaagtttttactgtaatacaaataatcatgtttaaccatgaaaactttttttctctctttatttacaaatattttcttttttgtacacaaagttcctggctactctaggctggttagtacagggttgatcaccctaaaatatctttgccacaataygaatgatgtgcttttgatggtatgtcccagatacatatttccttttgtggcctgacatatggcattgtctggagaatattcaatatatgcttgaaaagagaatgtgttgtctcttccttttatggaatctttcataaatatcagatcaggttgcttgatagtgtttgttaatgtattctatattcttacagatgttctgttgttcaacaaattactgaaatagaatcattgaaccctttaaaaaaagatgtcttatatacaatccaaacaatatttctctgggatgtagagatgatctacattgaggcaatatatcctttgagagttttgacattttagcataaccatgtattagcttttgattgaatgtcttgtcacagcatcttgataatcattgcctggtgcagtccgtggacatacgtcttttgtggagaaattttcttcaataaataattaatagttcaatttaggcttcttattttatagacattttctacataatttttctcacttttacttatagattgtccttcattcattgatctgcaattctcaaataatctttgaacttactgtgacaatatatttagccataatatataccttttctgtgattataagattattcatagaattccacagcatttattaagaactgtcactttattgagtctttcccaaaagtagagctttgttggatgatccaagaggaaccatctaacgcggactatgagaaggaactagttgcttttcataaagatgcaaataacagcaagatgctgttacagttgttttgaattagtcacacaactttgcatctggaaacacggtttagaactatgaaaatgccctctactcttgatagttgatattaggatattaatttctatttgctctgaaacatgttttaaaaaacagcaactctaaagaaaggaagagttacagaagagagaaacagggatacacagacagagtcagaaacagagacagagataaagagatccagccagctgtacataagattccctacattacaattacagatacactaattaagttttaggagtaattaatcacataaaacattaatgcaagaactgaagttaatttagaaacatcttatctttgtttgtcctagaaaagcatagtttctcttcagatttgtttatgttgttggaattttcttccttttagaatagayattactttccaaatcacctttagagatgcatgtcttaatttattgttccccagtattaggataaatgaatgacttgaggggtakattagagctatggactcaccaaaaatcacagctaattccgwctctggcataaagtagctggaggtggcaatgagaaaggacaaatagtaggcaataaagaggagaaggaaggaaatgacagctttcagggctctcacatgggcttctgtgctggggtctctgcaccctgtggcactgagctgcattcgcctgatatgtctccgcagggagaggatcaagaggaaaaaggacattaggcacacacaaaaggggagcagcgttgccaggttgagaaataacttggtagaagcatgttgagttttatttactctgcaactccaagttaagtttgttttcctctttgccttcacacaaaacctgaaatcagcgttcaaattctcagtggctggaaggctaataaacacagagagaaccacgcaccccagtagaatccaggaaatcaccctgtcaattctccacttcatccagaggaaaagtgggtgaaagaaattacctatcttgaagaaatagtaaatgctgaggcaggttgcaaaccagatacttaaatgattggttagtgtccagaagaagtcaatgattctcatttctttaccagtggcatagacatctggatatagcaccaatataaaacaatctaatagtattacgcacaatagacaaattctggatatggccagacttgtgaggattaaatcaatggaggcaattttcctcttcttgacccagtccatgcagtttaccaatccaatgaatgcattccctaagatccccactgaaaactctccaactgctaagaacaataaagtagtctgcactttatctgccatgtttaaatatgcaattagtttctagttgacctgatggagtttgacatccacacctgcttcttagattttgatgtagttttctttacctctttgttgtagtctgttttgtgatggagactggaatgataaatgaagactggagctatcttcattaaatcctaattagtcttgacaaacaatgtgtttgscgatccttggcctggccactgtatgcccatttacctactcagcaggttgtaattttycacatacggttaatttaggctgagctactgtttactaagatgcaaattgggccaattccctttcatggtcctgcattgtctttctgaggctaaggtgtacgcattttggattcattaatttgtgatgtatgctagtaacctcaatagggttgctagatttagcgactaaaaattcaggacactcagttaaacttgaattacaggtaaaaaaatcaataattttttagtgtatgtccctgattacttaagatcagtgctttcaggaagtactgaagttcaaattagattgagtgttccattctggcaacctgaacatcaagaatttggtagcaagtataaaactggtaaaattggaaagttcttgaagaatttttattttgctgaatgttaatattgataattagtaaagaatccaaagtttggttccatagtgagagttatatattttcaggaactttaaaaagttaacactaaatgtaggttatttgattccaaagaaactttaggtcattattttggctgttcagatgaacaattacatggcatagtgtctcttaatacaacacattgtcttactgactaaatgacttttaatggttatttagcaatgttatatataataaggtagaggacctgtaataaaaaaagactattgattaccttaaatttttcattttcacttaaaatgttctcaaggaaactttgagaggtattagatatgtccattaccttgtttgtggtgaagatatcatgggtgtttgaaattttatacattaaatatatgcggttctttttataccaattatactttcataaagatttcaaaaatttaaaaaatgttctcaagggtagttgtatgcatgagagaggagatagtaaaattctgtatttcattctctccactgtcctccatacaaattgcatgagtatctagatcctcaacccttctagcaggagactgaagattaaactttccacatctctagagatgaatttttagtttgaaatagcttctctaatttagagttactgagaagcgctttactacatggggttccatagaatagttcttgggtattcacaccttcctgggaatgcatgtcttctcttatccttccttaaaggacaaaccatcattccggagatgtagccttaacttttggacaatctgtatgattatgtagccatgttcacaggcaactggaacatcacctatgataggacgatcttggatatgatccctgacctagacttatcatttcttttgttttttttttgagatggaatttcgttcttgttgctcaggctggagtgctattttggctcaccgcaacctccatctcccaggttcaagtgattctcctgcctgagcctgccaartagctgggattacaggcaggtgcaaccatgcctggctaattttgtatttttagtagattccgggtttctccatgttggtcaggctggtcttgaactcccgacctcaggcgatccgtgtgccttggcctcccaaagttctgggattacaggtgtgagccactgtgcctggcctagactcatcatttttaccctacagtttatcctggtaaatgaagtgctcatgggaactatgatgatgtattttctcaaataatttttagacttgtttttgtttagttttggaaataaatgtagattttatgaataccaatgttgtatagcgtgaagttatgtgaatatatagttaaaaaaaaagttctatgagagagcattttgtcaaaagcttactactttgaaccccagtcactgtggtcactagagatgcttgaaacattagagaggcaggaaacaaaatatggaagaaaaaaacttaaccctaatggggtaaaaccttcccaaaagtactaattcaataaaacgtttatttcacttaaaccttaggaaaaatataaagttcatcctagtataaaatctacctgtattttgtagaatacattaatatatttcatcaagagaacatgaattcttgtgtcttgtaaaacaaagagtaacatatacagctagcatattagaaatatagttcataaaatttatatacttggggctataaatattagtactttacagagtgagttttacataataataagacaaacaactgataattttccggtaattagtattttagttataataaaaggaaattagtagattgaaatacatcagaattaaacagaaagtaatgggagtaaaagcaataatgtacagccatattagtacatacacaacctgagatatgccagaccaaacgtttcaataatattatagtgaggatgkatttcatgttcacagaaaaattaaaaattttagtgacttattttccttttttttttaataaaaatttatctgtattttttgtaaacattcgtttcttcttccagggacagtatgtgcttattccatggtatacgctattttcttcccaatttatttcttttgttaagtcctgagtgaaaacctttgcagggtctggttagagaaaagaacctgattgagcagtctgactaatatttgttatccccattcttttatccagattgtgaagagggcttaggaacaccccttggtgggtggcacttgaatgggttcgattcccacctaggtgctgcatgaaaagcaagttgtttgagaggaaatttaattccaaggaaaatcaatagaaatcatcagaataaggtcaaccagaaaatattacctaggagaccatggaaatcatcattcgggaaaaccaaagacagaccagagaacatctgagttcctaatcaataagccaaatgggggtgactcagcagagccatgaaaggagcacaattaaggagcggcaataaaaatgtatgacaaagaaaaatgagaaaccagttactgtagctcaggtccactttaccatgagccaaagtaaaatctaaaaagactttaactaggcaatacaggcctaacacttgcgttgaggagacaagaagagaagcatgagctctgaaattcttcgaggaaagggagtgtaaagatgagcatttctgagttgtaaagggatagaaaagatgtattcagtagtttgctactaggtcctaataatatttaaagatatgcatccaaaataaatgagataactggggaaaaatgagaatagactattaagaaaactatattttttgttagagaagatttggttttaaattccatttatacagctaagatttcatatcaygcaggcaatttttctacatgtcagcattctgacaaatgtctgcctcagtttattatttaaaacaattaaaataagtgagtgacccaaggggtagagaattgctgcaatctctccaaactccacagctaacttgtattttgtcataagatagctaaaggtcatcaaaatagaagaaatatagtataggaaaaaaaagaagataaatgaagtcatagttttaatggctctcacatgaacttctgtgctggggtctctactgccggtagcatagagttttatttgcttggtatgtctccataaagatcttactaaaaggaaaaatgatatcagtgacacaataaatgggacaattgcaaacaggttaaagagagtyaagggttcaaagtatggtattttactcacatggaacatttcagtaatgtttcttttatgtttggcaattgcatgaaacctataatcacaactcagtactattgctgctataaggctgaccaacaaggaaatggcaaagcatcccagcaggatccagtgcaccaccatatcaattttccacttcagccagagaaaaagtggatgagaggaactggctatcttcagaaaatagaagacattaaggcaggtggtaatccacatatttaagtagttggcaaatgtccagaaggtaaaaatgactatctgttgtttattttttgtataaacatctgggttcagtactattacaatgccatttacaaccattacactgatcaaacaaattctggcgataactaaattggtaaggatgtagtcaactgtggaaatctttttcttcttaatccagtcaatccagttgactagtgcaatgtatccattccccaatattcctagtatgaattctccagttattaggattataaagatgttatctgcaggactgaacatgtttgtagagagaacaatctgatttcaaatatcactgtagatgagctaatttacaggtgacctgttaaagcatgatagatcaattcttcgaatcatgcaataatgttttcatctgctgttatttcgacgttgttattcttccggaagtgttcagctctcctctgaaataggattgtctctacactcctgaagatgaaaccaactaatgagcagcttgactagttatttatagcctggaaaaattataattattatcctttagtgagtgatacctgaaatgtttggctgaaattgctcccatgcaaattcaaagagattttatatcatgaatttgcaacaggcttcttgctgtagctctatatttggatcttcaaattgagttttgaatagggagtcataaaaaaagagataaatgtttaataaaaacccaactgtgtaaataaaacttcattttcatcatgtaagttataaataagccacaaatcagttctcccagatgcaaagaaattttcactttggaagtaattagtacaattagattgtagatatttaacatttagtcagaggataataattcttgtcttcatttaaacggctaattagggaaggatataatacaaatctaattagaaatgacttttttttaggcaggcacatgataatatttactaagaatttgctttcttttcaattgttcctcagaagtgaaatatgccaggtaaagatttgttatctttagtttttttttaatgtgacaaatacccttgaagacaattcatttcctgaatcactgtctcttgtataataagcattgtaatctaaaattaagaaaatttaaattttacattattctagttccaatcaactccttttataagatttgtaatctcacagtgcatattatagtcatatttctagatagggcaaacacataaaaaagtaactacttgggagactgaggcagggggatcatttgaaccgggaggcagaggttgcagtgagccaagatcgtgccactgcactccaacctgggcgatacagtgagactctgtctcaaaataataataataattttttttttttacataccagtatttccaaggaataggactaattctactattaaattagatttatttgttttggggtaagggaaagtacaacttagcccaaaatacatttgaatgtaggtaatacraatcacaataccctagggcttcttgtatttaaatagttctacaatgtatacaacacatgcaggattttttctatttcttacatgtgtgtaatgtgtaacaggaaagcataaacttaataacttaaagaaacctagttatctataaactactgctggaaacaaaatagaaaagaaaatgatgcagagggaaaaaaatatgtcagagatttctgagttagaaggctagagagaacattccarggaatctttgggaaatgacttctaaaattgccatcaccagctagagtactcatgaacacgctgactactgggaccctcaaccttctttctcaaggtggttctgctatacataactgtgcctcctctctctgtcaaactttcattcttgagattatactccttttcccacatcatatatcatcttagatagaatctcattaaagattgtttttctcccttcttgatcaagacaaacccttccagaaatggagaggaaagggcggtgaagataaggaccggccttcatttcaaagtagagagttgttttgcatgattgattttatagcaagggttgatgagttctaaaatcttttccccaaagcctgtttgcctgacattcttctactcattgagttcaaggcctttgccagtatttgtcagaaaagaagtagaacctctttgtatttagtcaatgacataaaatgatgaaatgttagtgtgggatttagatgcattttttttttctgcaacgacaaagaatatacggtgcaatgataacattagattatccattaaacaagacaaaagtgtgaaggaacacaaaacaaatcttcagaatcatgacagatattaatgacttccaatagcatataagagaaaatgaatgcaaacaagagaagggagaatgccttttgttgatttctttcatccttgtagtcaggatactctttaggggtctctatggaacaaaargctttcttcttctaargaaacacttcacaaatcttaacatcttcagaaaagcttccctcaacttgctatttcccataattagaatgaatgaatggcttgatgggaaaatgacagttactatgtcaccaatcatcaacactaattttccctgaggaatcagagcgctagaggtcataacaagaaagactgggtagtacacgatgaggaggagcagaaagatgatcactgcctttatggccctcatgtgggcctctgtactggggtctctgaaccctgtagcatgcagtcgaatctgcttggtgtgtctaactagggagaaaagtaacaagaaaaatgagatcaggcaaaggataaagggaaccatcrcccccaggttcagggttaactgtttgaaagtacctggaattttactcactttgaatttccaagtaatgttttcttcatgactgactttgaaaaggtgataccacatatcatcattctttggaacactaataattaaagagataagaaaggaccccagaagaatcgcaagcatgaccttgttgatctttagcttcagccagaagaaaaatgggtgcgatatattggctatcttgagtaaatagaagatactgaggcaagaagtaaaccagagacttgaattattggcaaatgtccagacaacattcacaatgcttactagcacgctattgccatatgtacctggaaagagcagcataaagaagccatctaatgatattacacacagcagacagattctggagatggccaagctgatcaggatgatgtcaatcaaggaaatatctcttcttttgagccagtcaatgcagttaactagtacaatgaatccatttccccaaatccctatggtcaattcaccagcaattaaaataatatatattgcctctattgcacttggcatgccagcaaagacttgtgatttttgaatatcactgatgatgaattgactttcagctgaccagtgaagaacaatgtatctgtctgcctcttagaccatgatatagttgtctttatctctcctttttgttagctgtgatgcagatgaagaagatagccagtcctgctctgggctagagctgcctaaagacttcaatgattggggccagtaatttcctttggtgcagtgatgactgaaagcctctaggatgcaaatgggaatggatctgatttcttaaatttgcacactctttcttattttaagctctgtatattttggatttatcaatctgagctgttgaccaggaacttcaagaaggtatcaattacttggaaaatatggctagaatttaatttgctggatgactatccatccttgttagtatattgacatagttattgctattacagattctaggtttactgtgttagcttgtgtggccagtttgcttgcttggttgactaaagctttaaacaaattattattaacattaaatgaggcttaaatggcataactggtggaatgtagaggaaagaatctaaaggtgtaggaagataggagtattaaggtgaatttatcatatgcgaacttcaccttctccccattatatgacttaagagggccaaaaggacactccattcactagggcattgagaaatacattaattaggtaattcccaatatcctcaaaaagctctgcagtgtttgtcttctcaactgaagatacaatgagggaaataaacatgacattgtagtgttgtcagcaaatgagacacggaaaattctggtttagatgttagggtttcttagagtgttcttgctttgtacctgaatgtagcttccatacatagaaaaaatagtcaaaatactggtcacttatctttagaatggaaacagatcagcctgaacagtgaggaggacaaagagcaagaaagtgatatttttggaactaaaaagcgtgatagatatacaagactcttcagtctgaactgagtgataagaatacatgctctgaattttcttagctctattttttggcagcaggtgtattataaatattagtatgctaattatacacacattggaaacacactgtttcattgggacatattgaaacatgtcattgggcatagtagaacatatttgaaataatagaaaaaggcacacagcaatacacagttcccagaaatattattttgaaactaatattaaattttaaggcaatattaaatattgcttatcaaacaaacacaacaatacaaagtatttaatgagataatgtgtcatatgttcagggttttagacaaaataaagagataaaaattaatcttgcagatttttatgagaaagtaaatagctattgttattctattcagtgaaatttggggtttctttcatgcttctctgtgaattttgtttctgaagaaatatcagattatacaactcaaaaatacacactgtgcttgtcatgaccaaagccataaaacaggtaatattctgagaaggacttcactagagtaaagaaattgatttgcatgcaactgacagacaaggtcgcaccatgttcacatctcagggaatgcaatatttcattattttaattaaactttttgaaagataaaattttgtggaggggaataaagtaggttcaaggttattatttggaaatggaactactctgggatcaatttgtaatgtccagaaaagatgaagatgaaaatatatcatgtaggagggtgattaataactgacatattaaaaattcctggtaaatccagatatagaatccaagcttgccttctgaatcatggtctttcccactacctcacttcttttccttagccgtgtggaatactgatcaatttaagaaagttatgcctatattcaaatgtaaacgaaaatatgctataggatatgaccagagttacctaagggcctatacttactaaaatgccaccctcttttatctttccttgctataaataaaacccaaatgatctcaatttatttgacaccgttgaatatgttttttttgtgtgtattgtgtgtgtgtgtgagtttatgtgttatttgccctttggattttatcttagcattgagaagttaaagagggatcctagctgacagactttaacatctattttcattgcagaaacactttaatctagaatgttagtttattgattatttctgtctctactagaaaacagatgaaatactgggaaacttatgacatcatttcctgtatgtctttctatgagaagtgagcaaacacaaacctacttaggcagatatttcttaaatttcattttctttcctttgtttaaatactttttaccattctttagaaccttacatcttttacaggcatttgtccttgagttatgccactgattattactgatcaagagaaatgactatactcttcagatttataaatcaagaacaggatactgcgatactgtcytattttctgacaacttatattttgaatagttgctgactttatctcctaccccattctaaactcttcactatatccattgggatccctagtaaaccattagcagaagccatatattctcatttgtttctctaacagttcactttattttcttcatttgaactcgaggttctggaacttttttgttcaatggactactttgccagtctggtgcatgctataatttcagaataatgtttttaagtgcatgaaataaaaatatttgaaatgtataaggaatccatatatatatgcctttttcttgcagtatgaaatatattgttaatataatataggaatttatgtgctttttaattgacataacaaaaatatctggcagataaagactagtggtgaaagtaaatgacaataggaggtacctgtaacgacaaaaatttttggcttcctgaagtgaaaaaattacagatactgctggtatggtatgtgcttgttacttacattcaagacagaagaaatactagacttaagctaaggattaataaaaataagtatataatttggtgcccctcccagttcattcatcactcatgtccatgaatcttttcattttaatactctacaattaaatcctgtggcagctgttttctctctcacaccctcatagaagtgggtctaaagctgggatgggtgtttttctttccctctcgtaactttcagattactctactctctttcctttttccttttttttttttttttttttgagacaaagtttcactgtgttgcttaggctgttcttgaactcctggcctctagtgatcctcctgccttggcctcccaaaatgttaagattacaagtgtgagtcactgtgcctggccagattattctccgtctaattcctcacaagacatacagcagttcattatctcctgtcatcactctatacaaaatattacctttccttgtcacaatcataagccagtcttccttccttgatttttgctttctacctgaaattaagtagttaaatatactaaatttcaccaccattctttttgctaaagttcccctatctttttgttggatgaaataatcttctattttttaaaaaaattcattcagtaatcttgtttgttgtatttttcwttttttaaaatttaattatggacatataatagttgtacagatgtatgggggtacatgtgaacctcatgaaaacagagcaatataaagacccctgttgagaagggataacatgaatgagaaatatgcatgtctctttaagaagaggaacagtcttaattaatggataactatatagagtcaataattcaagcataaaacactttattataatagcatattgggaatagtcttgtctatttgtataaaaatggtgaagaaatagaatatttgggatccatggagacaaataatttatttgctaaataacaaaatttggacaaggcttgaaatatatataacagttaagagcttcagctctggtgccagacagctggagttgaagcttattctcagttttaatgattgtgtgatttaaattgtgctgaatcttttctttctccaatgtgtaaaacattgatcatagtgctatctatctcatagaaatattatacttaaataaagtcttgcatttaaaatacttagaatagttcttaccatatatactcaaaaaattttaggtactattattattgaattttttggcattccattcaataaatcacgattctcttatctagttgttttgctatagagcctttattaatgtgtcttaattacaatttcctatccataatatttggccaaatttcacattttatgattgccatagtttgaatgtttgtattttcttcaaaattcatgtggaaatgtaatccctaatgcaacaatattaagaggtggggccttttaggagatgattatgatgggtttgccattatgatgggattaaaaggcctgaagggaactaaataggtcttttaacctttcccctcttctgccatgaaaagatacagcattcaaggttccatgttggaagcagtgacgaagccctcaccagacaccaaacctgccactgccttagtcttggactttctagccttcagcactatgaaaaaataaatttctgttatttataaactacctcatctcagatactttttatagcagcaaaatggactaagacaatgccagtcacatgaaatcataaaatatggcaacataatagttatggtttaacaatttgttttgttttccattactcactgaaaatgtaaacaaacttaaatggacttagttgtttttttccttcatatgtagttcttttctttattcaatattaatgcccagtgcatctcataatattaatggacaggtgactattttgtttctctctgcaatggcataaataaaatgattttaacagcatttcaacttaaacacaataaattatttatttatatttgacaacacatctaaatgttcaggttaagtaaaaatattctcagatatataggtttcagacgtttactaaacatagaacttttttcaacattttggaggctacattaacaaaaactataatggggtgaggagatacctatatgaatatgtggagtaaagtttataagaaattttgtaaggcttaggatgtcaaaaaattttttaaaaataagaaaagaacatttgtatactataaaaatcttaaaactccagttgtaggtagaagatcaacacataaaactstgttgtgtttctacacaccagcaatctgaacagtgaatataaaaggtaaattaagaaaacaattccaaaataatgaaataactaggaataaatttcaccaaagaagcaaaatacttatatacaaaaattgatgaaacattgctgaaagacattaaggaagacacaagtaagtagaaagacatcccatgttcatggataagatgacttgatactgttaagatatcaatactacccaaagcaatctaaagattcattaaaattcctatcaaaaatttctacagacttcgtttcagaaagaggaaaactaatgctcaaattcaggtgaaattacaagggaatccgaatacccaaaacaatctttaaaaaggagaacaaagttggaaaactcacatttaatatttttattttatatatatatatatacatatatatatatacatatatatatatatacacatatatatatatatatatatatatatatatttttttttttttttccctgtatgcctcattaagkcttccctgagccctgggctggcttcttccatggaagatagcagaagaagcaaggcttgtccctgttcacagaagatgctagccagatcaggagctgaagatagcaaaagagggagaagtccaacccacagtcccaggccctggtgagtaaggtctggtgcgaggagaaggctgatgatatggaagggtgctccagtcctgcttcttctgcttggaaatggagaatccggagaacctgggggatgcaagatggacaggctgctccttgagaacatccagtctcctagaaaaaatgggtgctctcaaggtgactgaatgaactcaactatgccttgttattttaaaacccactgtctgctttctgaattgacaatcaagaatccatgtgtgtcttaaacaacaattgttcattgtagtagaacccactgggagaagccttttggctcaggaactccatctagccacagctgattgaattaggggtggatacctaacccaagtggagccaatcttattctgtgcccactgcaatgtaagatgtaaaataggtatttttgtctccttggatcagtgctgtatctttagtgtctagaattctgcctaccacacagtaggggctacatgaatatttaatgaacaaatgaatgaataaataagtctctgtgaggaatttggaattttgaccttggaaacacagagaatggcagttgtggaaactgagtcacattggctgcataagctagaaagaacacccactccttcccatgtctgaggtcttcgggtctatctcagtcatgactgagtcctgactctttctaaagatgattggactcctcttaactttaggacagatggctcaacatcctaactataaaactccttcctcctttcctgcttacattcatttctgttgcaaccaaaaacctttaatgacatgctgagaaattttgcaccttgacatattctgttccccaccttaggagcttctctaggagtcataatcactcctggctgtaccttgggctgcatccagatctgccccaatgccaccacccccagctctgtgggctctggctctaagactacagggacccagaagcaggaaagagtggcatcatggaattccatgtcctttagggcaggtgggaggtactatgcctcttctccatccaagaccgctcactacatcctgtcctcagatatggctcttgggaccctcaagtcagatactcctaatttttcatctgcttttgctctacagacagaaagaggaggtgccaaagaaatctacagattcattcaaatccttattaaaaattctcacagactttttttttcagaaacagaaaaattgatcctcaaatccataagaaattacaagaaaccttgaatttccaaaacaatcttaaaaatggagaacaaagttggaaggctcacacttaatattttaaaaattcactacattacttctcagccttttggctaagatcaagtataaaacttactacaaagctatggtaatcaagactgtgttttattggcataaggatagacatatagatcaatgtaatggaattgagagtcttgaagtaagcccatatatctatgactaattgattttgacaagtgtgtaaaaattcattagggcataaagagtctttttgacaaatgatgctaggacaattagatatccacatgcaagagaatgaagttggacccctaactcacgtcatatacaaaacttagctcaatatggatcaatgacctaaatataacaactaaaactaaatacacctagaagaaaatttagtggtaatctttatgaccttggatttggcaatggattcttacatatgacatgaaaaaagtaagccacaaaagaaaaaatacttaaattggacttcacgcaaaataaaacttttgtgtatcacaagccactccaagaaagtgaaaagacgatgtatagactgggagaaaatatttgcagatcatatatctgcgaagggcttaaaattcagaatatgtaaagaacctctacaacccaacaaaaaatccaattttaaattgggcaaaagatctcaacggacatttctccattgatttacaaatgtctagtaaacacataaaaagacgctaagcatcattagtcattggggaaatgcaaaccaaaaccacagtcacrtattacttcacatccactagaatggctatagtaaaaatcctggaaaataacaagggtgggcaaggatgtggaaaatttggaactctcgtacattcttggtgggaatgtacaacgataaatctactgtggaaaacagtttggtgactccacaagaagctaagcataggaattgctgtattatccagtaatttcactcctagtatacattgaaaacaggaactcaaacagatacttatgtgccagtgtatattgcagcataattcacaatagcccaaaggtagaaatcacccaagtgtttttcaactgatgaatatctaaacaaattgtggtgtatacatacaataaaatattattcagtcatacaaaagaatgatggtctgatacatgttaaaatattggtgagccttaaaaacatgcttagtaaactaaaccagacataaaatgagaaaatctgtgtgattctactcatatgaattgcctagactaggccaattcataaagccaaagaggagatcagaggtcaccaggaactgtgggaaaggaaaaatagggagttactgcctaatgagtccagagtttctatctgtggtaatgtaaaagttttggacacagaggtgatgcttgcacaacattgtgaatgtagttagtgccacagaattgtacacttaaaatggttaaaatgacaaatttgttatataaatgttatcacaataaaattaaaacaaaataaatgtgtaaattaaaaaattaatattccagaccataaaaacatgcagcatggaaatgactgtcattagataagaacaggttaaacttttaattttatatgaaatgaacataaagataccaattttaaacccagcacatgaaaatttgatatcaatagaaacaggaaaggaaaaagatctgcaataaagcattaaaatagagtaaaaagaagaaatgagaagatagaaaacaatgcaatcacaattgtattgagtgtaaaaatgtttctcaatagtaattttgagattacattattaaataaagtgtcaaaaatgaaatatttgttttctacaagagacatttaaaaataaaatgcagaagtgttgaaaatgcagaggtggaaaacacacaatttagaaatgataaatgcttgaagtgatggatcctaaatatcttgacttttattacacattatatacatgaaacaaaatatcacatataccttacaaagttgaacaaatattatgtatcaaaataaaataaaataaaatgtaacaaaattagggaatttaccaagggtgaaataaaatttaaagcaaaaattttcatggcaaacttttttaatatcagtaaaaataaccataaaaaagtaatgaccatgaataaaaatgcaattatcaacattgcttcaaattaaatgcaactacaaataaaataattatgagcataaagaaataaatcagtaattgtaagtgtaggtttactaatttaactattggaaattgtcatatattaaagacgtaaacaagtaatatcattaatattgttcatctaatgcatatacatttaactttaacacatcaaactcatttaaagaaaatcattcacaaaaatggatcatgtattgggccaaatgaatcttatcctaggccaaatatcatacacatatgctgtctgactcaaataaaataagatatcaatacaaaagttacctttaaaaatctcattattgttaaatatctcttgcattaaaaggaaagtgtaaagaatattttgaaattatttgaattgaatacaatataagaaccatgtgccaacatttgtggaatacatataagttgatatttgggcagaaaacatacaattttgaatacctttactaaaaaaaaaaagaaagattggacaaagctagtgaaacaaacaacttttgccttcaaaagtatggcaaaccattatcctaagcaaattaacacagaaaccgaaaaccaactatcacrtgctcttgcttataagcgggagctaaacattggttcacacagacgtaaaaatgggaacaatagacactggcgactaagtggagagggagggatggcaggggtcagggggcaaggactgtcaaactacctattgagtaccatgctcactacctgggtgatgggttcaattataccccaaacctcagcatcaaggaatataacctactaacaaacctgcacctgtaccccttaatctaaaatagaagttaaaattatttttataaattaaaaaaatctgtataaaaatatatgaaaaaccagatgtctggaaaaatccttccagtcaggaaaacataaagatactgaaaaagaagccttcagaaatatttttaaagtgtatggtccagctgtcaagagagttaaaaaagaatcctcagatgccaaaaatagtaggaaagtgcaaatcatgagaggaaacagtgctgaagatagagttagtccctaactaactatcttggagttggatagaggagtttatcgaggagacggcattgtcactctcctttaaaccagtgtgtaagtattttttaattttgttatgtttttaaattgatgttccgcagtgaaaaggtatatgcaaaactatccctaaaggctgagggagctgagaggccaaagaaagagtctaacaattccagtttctcaaaaagaaatatttattgatttatttataatttttacttcaacaactttttgggtacaagtgtttttttgtcacgtggatgagttatatagtggtgaattctgagattttagtgcacccatcacctgagtagtgtaaattgtacctaatatgtagcttttttatccctatcctcccttccrgcctcccccttttgagtctctaaagaccatgatatcactctgtatgtctttgtacactcatagcttagctcccgcttataactgaaacatacagttttggttttccagccatgtgtgttacttcacttagaataatggcctccaggtctatccaagttgctgcaaaagatatatatatcttatacatatatatatctatcttatacatatatatatcttatacatatatatatcttatacatatatatcttatacatatatatacacacacaatcttttttaaaagaaagcaatatttaataggaacttataaacagaggcaatgtcttgggtggccgcaagatattggatccccacagccgccctccagaaaatatcctttatatattaagctttttgggtaaaacatgtgcagctcttcatacctcaggctctcttgctaaaacttatgaccattaagaaggttagataagcatctttatgaggggctctctatgtcacaggaattatttaaagaacttgctgcagaacacattggcatgcaggagttaaacatcagtcgttgtggtagtttcgcttcaggatggcatcactctttctacgcaatargctattttcctacgttatataataattactgtacacatttatcargtacatagtgatgttttgaaacatacaatgtatagtgattcaataggttaataagaagatctatcatcttaaacgtttatcatttctttgttgggaatattaaaatcctccttcctggtatttaaaactatgtattattgttagctatagtcatcctatagtcctataaaacactagaacgtattcctcctatctagctgtattttgtatacttttacaaacccctatccttcccagcctctggtatactctgctcttctttttacttctatgagatcttctttttttagtttccttatatgagcgagaatatgtggcgcttaactttttgtttctggcttatttcargtaccataatgtcttcctttccatccatgttgtagcaaatgacatttcattttttaaaaaaaactgttatggctaaacagtattccattgtgtacatatacagcattttcttcatccattcataaaccagtgcttatgttttaaaagaccatatgcatgttggataagatacctggtttggacttctccaaagttagaagtgagattggatactatcaacaagccaagatccctgaaaggcaaamccttaataggcaaatgagaaaataatataygtccaacaaaaggctaaagtaggaatacttaacactcagccagggcagtgaattgaaaggggaatgtaaaggggaatgaaagaggaatgttgctctaagaatttgttataatagcctttcactcatgtatatttggggctagaagttgaattctacatagcctaaatcattacaaactgaaaagtttagcttaaagaagttgatactggaagtgatcccagtcagcctttacaaagtcaaactttttctggcagacgtcactgtaaacctgatctcaaagaattcccacagataatattctaataaaactgagttcaaaataaaatcataaaacatgtgaggaccaaaccaatataattgaaagttagtacaaacaacaaagttagtaatcagagctacaaaggcagcagatatcagaattagagcttctgcagtctgtgcaaatgctaaggaaggttctttctctttcccttgtttctcaaagcaagtatgactaaacagatattttttcacaggcctcatcttttatttaattatatttttcatatgacataaattattgcatagaaaattacataatactacaagaaaataaaaattatctataatcccaatatctacaggtaaagaacctagacatccagtttatgtataaatctaatcaaaacagattttttaagtaacatgcttattatctgtcatctatctatgttgagatctattttacaacgtatgtagaaacatgttaacaatggttagttgagtactgcaaatgtgcataatcaatttcttctttatatatttttgtgtttgctaattttagatgaaactgtattttatagtacaaaatggagcttttgatgaaaggaacaggtatcagtaaaaataagctaatattggcaaaaatagcagaagaaaacataaatcaatatgagatcatgtaaattacccacctattgccccaaacattacaaactagttacttactaaacagcaaattaagaaaaaatcataacacatatatggcatagtgttaatgtataaactagtcacaaaattggtaagaaaaactataagacatgaaaaaataaggagaaaacaaatgaacaattcccaaaaagtatatgctattggttaatcccgtagtaatgcttaacttcactagtaatcaaatatatgtgaagtaaagatatttttgcaatcaaagtagtgacattaaaaataataacctgtttgattttgagactgcaacaggacggatattttttcactattaacatataggtttattatatctacagagcaatttatcaattctgcaaggaatttatcaagtttctccccattggaattttccttaaaaataatttacatactgctgtctctatatattagtcacactggacctttagtttctggactaccctctactccttcttgcttcaaggccttgacatgatggtttcccaccccaaatttctcctcttttgtccaccatactcctacacattattaagatatcaaattaaaccatcttaaccacagtgacatcttgtccattctcatgaccaggtcaggtcagcatcctatagtttttctctcccaatatcataaatatcattgtttaagttagctagctattcatttgttttctattagaatatattatccattatattggtatgttgttcactactatatcctcaatacctagccaagttagcattcaaatagtattcatatgaatgaatagtattcactctctataatactcatattatgtttatttctaaaagtggaaaactgaagacaacttaaacgtaaacgatatgataaacactaagtatattattgtatatttgcaaggggagttattatgtaccccttaaaaagattattacaaataatttttgaaaacatgggaaaatgaataaattctacataatcaacataatctatacagagaacatagttctttatacaatataatttcaaatgagccaacctggtatatttggttgaaataggcagcagcattaggtttttttttctgttatctcttaactatctgtacattctaaacacaatagtttaaaaatataaaaatattgatttggaaacctgacatagaaaattaattaagtccttatatttggaaatattccactcattaggccataagtatgagatcaaggcactttcggaagttgccaaaataagtcactgagtttataacctgggttggacataaaagttaactttaaaactcaaaatttgaaacgtttctgtgagtgcaagtttgtgtatatgaatgtgtgtgtgtgcatgttyatgtgtgtgtgtgtatgaagcctgaagacagaacatttcatatttcacccagattctatcctgtgttcatcttgtgtcctttggtcagggactgtgttgaatcttgcagcctttggatcgatgcttctagaaaaatctttactcaactttaattggttcataacctgccttatctcaaatcactgattttgaagagcatatttatttcatcagtgttttgatcccatatccctcaactagacccttgtttccctaactatatttcacagaactacatctactcctctgactacttgctacacatcgtacaccagtaaaaaaggatgttagattctaaaaaatgaaaaaaaaacctttaaataattaaaatagcattctgtaaagaagtaccaccatctatcctcacttccatgttctaaatgtcaagattgatctaattttctttctttcttttttttcctttgggttttctgggagaatgggtgtccttgcttcagaaaagtcaggtaaagcacaacaagaagttttattttagagcttattctcaccgttataatctttacagcgaatagtctccaggctgatggtcttcctctaggaagtttgtaggaagaagttgcagggtggggaagctgactaagccactgaatttgcatgtgagattaaaatctcctcaaagactgagattccctgaaacatagtcaaaacaattatggaagatttcagtgatctttaatgacacagttaaaaagacaatgcaagaatgcagtgcaatgaaacagatcttcaaggatttattcactggattcctttcgtggaacatccatctcttcccaaggtgtctatgtgactctgagatttttccttttctcacagcacttcaattgctgcagtaccctcaaagaggcttgctttagcttgctgtttcctagaattaagataaatgagtgaccccagggatagatggctgtggttgtcattccaaacataagcagcagtttgttttctcgcacagtaaaacatgatatttctatggccatgcctataaaatacaagataaagaggatgatgaaagatatcaaaactttcattgccttcacatgagcttctgtgttggagtctctcaatcctgtcacattcgattgcatctgcctgttgtgtctccaaagggaaatgattaaaaaaatacatgtaattagggatagtgtaaagaagaaaatgactcccagatttagcaaaatctgtttaataaagtattcacttttatacatgttgagatcccagactgtgtcattcttcrttttataatcattaagaatcttcgcaatgtatgcaaaattaagtaacgatgaaataagtaagaatactatcatgaagggaagaaccatatttgttctgctcttcaaccagagaaatatgtagttggaaaaatttgctatcttcaggaaatagaagatgctgaggctggtggcaaaccacatacttgattgattaccaattacccaaaagtaactaatatattcaattaggttaccggaggcatatatatttggagagaatatctgtataaatccatctgtaattattatccatatcagaaaaattcttgaaatagctaagccggtgagaataaagccaatcgtagataacttattcttggcacagtcaatgcagtttacaagtccaataaatccattccccaaaaccccaaacactgactcactaactacaacaaaaatgaagatgccttccactacacgtagcatatctgctaattcttaatattgcttctgttacatctatcttagattacctgctgcagaatgaggcatatattggctgctcgacggaagtgtgactttcttctctttcattatataaagacttgaaattgccccagtaatggcttgagatggaatcagaaatttcttaatgaagacctttccaaatatgtctacaaaacatagctagtctggagaatgtatgttcagactgaatgcctatctataatttgttaaaatgcaaatgaaagtttctgtttcatggattttacatgtcctcctgagactattttgcatttaataaattgaattgtggaggaggagtgccaaacatatacctatagaatgtaatgcaaaacagaaacaaaaattttgactttatcttttaaaatatcaaatcattatttatgtcatttataatcaatttatatatgtacagaaaatactatatagaaatgaaaaacaaatttagccactgtagatacttactctaaatgatcgatttaatttttaattaaaatttaagctcaactctaggtatgacaagtttcacaaatatgtcacaaatctgttgctgttgttttatacttatggttattacacccttgaatgcagaagattatgttgactacccttgacatgaaaggctcttaggaataatctcttcatttaacacattactgtttgctggcacccattcatttatccaacaagtatttactgaatgtctagatacaacaagctctcttttgatctttgagggaatatagtggtagacagaatttcaaaacttgtgtgatttatggagtgtatattctaatgagggaggtgggaaacaattaagtaaatcaacatactgatctaagaattaaaagtgaaattaaaagtgaaatctaacatttattgagcttttattatattcctagcgctatgttaagtatctttttctcatcttaatttcacaagccttcaatcctttaaaagaggggctatttttgtatttacattaaatatgaataaactaagctttggagaaaagaagaccttctctcacttatcctggcatgactaccataaataaaattgcacaatgatttcaaaatgaagttaaattaagcttaggaatagactacaaatgatagcaaaacaaaacaaaccaaccaaaagcaagtagaaaacttaaattctcatgggctgcacatactgaaattgacagataagaatatgtatagataaattagctaatgtatacactgtttacaaaaaacaagatgcaatttcagagaagagcagcaagagactgttagaaagaaattggaacatttggggaaaaaacttctagaaatggagaatataattatataaaatgtaaatgaactaaatactccaagtaaaaaattaatagtaacaaagaagaatttaaaactctgacygtatactgcttacaagaaacacaatttaaatatagaaaaggaaaactttaaagtaaaattatggaaaaataagccatgcaaacatcatccaaaagaaatctggcataattataacaatattctataaagcagactttaaggtaagaagcagcattagagaagaaatggggagtgtactttatagtgataaaaatgctcaaatctacagaaaggtagggtaatcccaaaaatttatgaaccaaataatctaccaaacatttacagaaaaggaaaaataagacaaatctacaatcacaatgaaagactgtaaaatacataactcaataactcatcttagaaacaccaaaaatcaatagatggaaaatacatgaaaaaacaattgacaaacttgtgttcaacggtaaaataattcatattcttttcaagtgcacatagactatttttaccaagactgatcatgaatccaaaagaatatctcacaagtgttgaatgttctctgaattcaaaggaataaaatgaagttcaataataaaaagataactagagaaagaaacaatttactaagacaaaaaacctgtaaatactcttgagtcaaagaagaaataacaaaaattacaaaaatatttttaagtaaataatacaggttgtgtatcccttatctgaaatgtgtgagaccagagagctttggatttcggatttttttttctttttttttaagttttggaacatttgcatcatactgattaagcatctcgaattcaaaaatttgaaatccaaaatgttccaatgagcatatcctttgagcgtmatgtcagcgctcaaagagtttcagattttggagcatttcaaatttcagatttttggattagggatactcaacgtgtaataaagaaatgacctattaaaatttacataatccaattaaagccattctttgaaggaaatttgtagccttgaatgcatcttttagaaaggcagggtaaaaacagatgaattttgttttcatctcaagaagctagaaagctaagagtgaaagaaaatagaagtcaagaaattatagtwacagcagaaatcaccgatagaaaagaattaggtacagtaatatactaatgttggtcaaaagaaaatacaaattactacagtccttagagatatcagaaatatggcctgggtgtggtagctaatgcctgtcatttcagcactttgggaggcccaggtgtgagaatcacttgagtccaggagtttgagaccagcctgggaaacatagcaagaccttatctctactaaaaaaaataaataaataaaaataatttagcagggcatggtggtgtgcacctgtagtcccagctacttgggaggccgagcaggaggattgcctgagcccaggagtttgaacttgcagtgagctataattgggccactgcactccagcctgggtgacagagtgagacctcatctctctctctctctttctctgtctctctctctctctctctatacatacatatatatacatatatatatatacatatacatatatatatatatataatactatataatatagttacatatccttgtatataatcttttattataagacaatactgtgaacaactttatacaaaatttcatcaagaatacttataagactattacaggctaatatagcctgaacatagatgcaaaaattccaaacaaaatagagtccagcgatatataaaagaataattcattataacaaayggagttttaaaagccaattgtgagattaaaatgaaataattgaagatacagtcaattaacacaaaagaaagccagaaaaaggacagagggacaaaaataagtgagataaatgaaaaacattgagcaaaatgcaagacttacagccaaccatactgataattacattaaacatgatttgactaaacactctgatgaaaagatagagatcatcagaatgaataaatgaaagcacaattaaatgttatgcctagaagataaaacattaaacataaaggcacagatagattgaatgtaaaggaaagaaaaagctatactatggaatttgtaaccatagaaagcaggactggttstattctcaaagtggctatattatcaagacaagtagtagaaaaatagagggaagttgtataatgataaaatattcaatttatcaaaaatacttaacaatcctgaaggtgtatcagactaataattgtgactcaaaataaataaagcaaaattaacagaactaaagcaagtgataggcatagcaaagatttaaaaacccctttgctgtgatctgcatgtgtctcctccaaagtctatatgttgaaacttaattgccagtgtgccagtattaagagatggttcctttaggaggtaatgagggcagacctctcatgaatgagattaatgaccattttgatgtgcattctaggtatgttaactctacatgccttagattgtgcaatagtaactgggctcttatgaaagggttttaacaamttccacaagttctagactaatttctgcagttacatcagcagcaaaaatattcacaaaaacaatggtgccactgcatttcagcctgggcgacagagtgagactccatctcaaaacaaacaaacaacaaacaaaaaacataaagtaactggctaaatccatattattacagagacaagattgttacctagaggaaataagtggttttcattctattttgcttacttctgttaaatttctaacatccacyttctgtagatctraatgrgtggattacaacttattcacacctcttttttatatataggtgattattttctctttaaaatattttaaaaactattttagaggtcagtcctggcccaggaagaatttatttattttattttatttatttatttatttatttatttatttatttatttatttatttatttatttttgagacagagtctctctctgtcgcccaggctggaatgcagtggcgcgatctcggctcactgcaagctacacctcctgagttcacgccattctcctgcctcagcctccccagtagctggaactatgggcacccgccaccacgcctggctaattttttgtatttttagtagagacggggtttcaccgtgctagccaggatggtctcgatcttctgacctcgttatccgcccacctcggcctcccaaagtgctgggattacaggcctgagcccgcacccggccaggcccaggaagaatttaaatggtacttactcagtgacacaggacatatacaaaaaaagagtacgatgaagcaagaaagattacaccaagacttcttgttgacttctctctgaggcctacctgtgtagctaagagtgcccgtcctttcaggccacatttcaggtgccagagaatccccaagaaagttttcttcatttggccgtatccaaaaatcacaacatatgagtgacccaaagaatactgacttcatatcataaaccagatatcacaaccagtttgttctgtagcaaaaaatacccctgtaaatgtcaagaaaagggcaaatttttatagagcaacaagacaaaaaaggaaaaccgttttcttggctctgaaatgggcccgtatactggggttctgcaatccctgaaattgaacctaatgtgtttcatgtgtcttcacgaagaaaggagtaacaacaaaaagaaaatcgaagaaatagagaaagaagagagagatccaataaagaagattattatattattaacatttttattattacttacattgagtaatccagtcatatgtctttcatatttttttggacacgataccagaagacatcaaaagtgtacgtcaaaggaaagttggtaaacagaaaaggcagataccagtggaagtatgaaagctaccttgttaattctccattttagccaaaagtaaaagagataggagaaattgacgatctttaggaaataaaagacagcaagacaagtagcaaatcaagtgcacaagtggttggccagtctccggacaatggtaaggatatggtttctttccctagcatcagggattttctaatagaagaatattgattctggctaaggccaaactagtaagaatgaagccaaccatgcataacttctgatttctcatccaggcaatgcaatctgtgagtccaatgaattaatttcctacattccttttataaatcccctacctattacagtcatgaaaacctccaatatattcaacatggctacaaagcgaaaattctgatctgcagtttgttgtgtgactaattttcagatgacttactggataataacatagatcttatgtttgattgtgcagtgtttttattttatcatggcttttctttttagctataaagtttagcaaactgcagtaagacagtgaaatcactctctgtaacattcattgaaaatttctaactacctctgctaagaatttccagtcttggtccagctgtcagctacaaactgtaaatttctttatagaaagatgatcacactctggggactgttgtggggtggggggagggggagggatagcatcgggagatatacctaatgctagatgacgagttagtgggtgcagtgcaccagcatggcacatgtatacatatgtaactaacctgcacaatgtgcacatgtaccctaaaacttaaagtataatttaaaaaattaaataaaaataaaaaaataaaaacaaaattaaaaaaaaagaaagatgattgacaaaccaaattatcatttgctaacatgtaaataaagacacagactaattttcattgttttgaataaaattagttctcctcttccaatgaagtgtttcatttgatttacaaatctgaagtttgaaacagaaacctttcaccacattaaaattattcaacatgtagggaaaaccagcaatccttatgctaattaattataatgcagtcacagtgtagattgctacattacaaagtaaaatacagagcttgaaattttcaagaaacttggtgggcaatatatgaatctaatatgagtatcataattatcaggaaaacttcccccaccgctccccaccccccactataaagatgcaggcctttcaaataatctgtcagtagcattttaaacacatttttaaaaatgatgtctttcagtgaaacataagcaccccaaactaaacatggaaaaagtgaacttcttttgtttcctcaaaaacaagattctagcactttgggaggctgaggcaggcggattgcttgggcccaggagtttgagaccagcttgggcaacgtagcaaaaccccgactctaccaaaaatacaaaaattagctaggttaggtgtgttggcacacgcctctgatcccagatacacaggaggtggaggtgggaggatcacctgagcccagggaggttgaggctgtagtgagccacgaaaaaaaaaatgttttttttgagatawaagagtcttcaaatatttccacagaactttgttaaggttacattgtcttgaggggaaaatgcttaaaaagtcatgaatatacttaggatgatctgttatgtgtatatccatatacacagatataggtacatatatggctacatatacataaacatatacatgtatacaaatacacacagacacatctatttatacacacattgtactgtgwtttgtcctctacttctctgtattttagcttgtctggtttttgttacttggattgcttctttttttgcattattttattatttttaataaacgcaataattgtacatatttatgtgatacagtgtgatatgtgaatacatttatacaatgtgtaatgatcaaatcaaggcaattagcatatccgtttctcaaatatttaacatttcttcgtgttgggcacattcaaaatttgtttttctagctcttgtaaaatatacaataaattgttstaattgtagtcaccctactgtgctatagaacactagaacttgttccttctacctggctatacttttgtattcattaaccaacctttggctatctccctctcccttctcccctatcacatctctaggaaccattattctgcttcctacttctacggaatcaactttattagcttccacatatgtgtgaacatgtcatgtttgtctttctgtatctggcttatttcacttaacagatgttctccagtctcatggatgcttccataaatgaccaaatttccttcttttaatggctaaatagtattccattcattatgtgtatatatcatgttttctaatccattcaaatgttaatggacacttaggttgatttcatgtctcggctattatgaatggtgttgcaaaacacatgggagtgcagatatcacttcgacatattgatttcctttcctttggatacatacccagtggtgggattgctgaatcatatggtagttatatttttagtttttaagaacttccattctgttctccataatgactaaactaatttatatttgtaccaacagtgtgtaaaacttcctcctccacatcctcacaagcatttgtgtttttttgtctttttgaaaatagccattataactagaataaaataatatctcattgaggtttttatttgcatttctctgatgattagttatattgagcacctttttatatacctattggccatttgtatgtcttcttttgagagatatctatacagttaatttgcccatgttttaatctaattatttgtgtttttgactgagttccttctatagtctggatatgaattccttgataaatgaatagttttcaaatattttctcttattctagaggttgtatcgtcagtctgtcgattgtatatttgtgtatgcttttatcaaatcaacataatgtaaactaaatgagataaagctaaaatggtcatcgcttgcttaacataaaatgcattattcatctaattttattgttactattatataatactataattttaattttgccattgattatatagttgcaattctgatggaaacagtgaaatcactttcttttaacttatttcaggcagataatttcatcaatgaggctcaatgatctatcaccaaacataataaaagaagttggattaaatgaaagggatgtgtgctgagttatttgttgtcttcatttttgagagaattaccaatcaattcaggtgtgtttatgaggatttagatttccttatattcatgtaacaccgaaggttcctcagsacacagagagaagcctgtttcagtttgctgttccataaaatcagaaaaaaatgaatgactgaatagatagaaaaatgctaactcaagagcaaaaatctgtgccacaatgctatctagattaaaataatttcgctttataatcgtattgctcaaatagtatataataaagaggagcaggaatgaaattatagatattaggggatgtcaaacttatccttgcattcttattgtacaaaatttcctcagtttacatttaagcccacatgtaaaattacagcagaatattctggaaattgcccaacaggtgagaataaaatctatcagggagagtttccagcgcctgatccaatcaatgcagtgaaccagcaccataactctacttctctgaatccccattatgaaatctatagcagaaatcattgtaagcatattcttcaacatgtttgccatgcttgattatgggatctctgctttctgtacaccactgatttataaataagatgttataaatttgtgtatccaaagctttagtgttcaatatgtttctttatcctgtgctrttgattgacactggaaaagaatggaatgcctccagtgtgctcccagacaaagtcctagttgtctttgaaaaacgaaaactacctttatttttctcagaatttcagctagtgattttcaaggcagatattatattacctgctgttgtgacactgtttataatttccttgtaaagctatcaactaggatttgaattctgatttgttaaaatacaaaatagagattttaaaatattttttgcatctttttttccttaagatttaaatgttttttattcattcaccttagttataagctagaaacattaaaatatggtgtcttcatggatctcctgagaagcaaggcagtcattgggataaatgcctatatgagaaagcaaggagagagcgaaaggtgaacagagctattgtactaggatataactttgacccctgtgaaggagagagagagggaaagaaggaaggtcttaggcagcagtgcagtcctgagaacatttcaagatgtccagtagggagttatcaagcccaaggtgcaaattagaggagtcctgagtctcccaggagcaggcctgaccattgaatctgcccccttctctgtctttggctgaaagcggctcatggaagtgaatggggtgatagatttcatagcataggtgccatgcttgttagctgttggggaaatacgattaaaaacaaagtctcctcccaacccagaaagtctctccacaaatgtaatagagaaagaaaatagttttcttattaaataaatattaaaccagaatctgatatacattacaggcaacctactaagagactgcaaagacagaaagagatctcacccgtttttatatagccaatatatgcatatgacccaatatatacattttctcaagttaagtgataactaatccccaagagagaggacttggcagcattatttattaygcatagtttatcttaaatttacctggaaattggggtggccatctgtgttagttaacagactttaaacaaaggacaaataaacacagatctttatgtaggagatagtcttgccatttggagcctggtggccattgaagttaggctcctgctcccagcagaaactgagagataagggtgcttatttgtaaaagagatgattaagcttctttatttttagtgtgtatttgcccttctgcagctaattgtgctccctcargacagagatttcagaggcacattcctatcacatgccacaaatgtctaaaatgacagtttatcttcttactcacctcgccaatacatattatgtataaagtacccaaggtttaagtaaatacacaaaatctgctttctgatactatatcaggatcgcttagagtctgtggcagttttgaaacatggctgcaaactctttgatcctcttccttttgaggcctagggtctgcagaccttcctcttaaaactgagtgggcttgtaactgctttaaacaatgacgtgtggtggaaacgacatcatatactttctaaggctatcaagaaaaactgtatggcttttccgttactcactggaaagtttcctcttacaatcctgaaccacttcataagaagtctgacaaagttgagaccagcatgctgtgaggaagctcaagccacacgaggaggccacatgtaggcaatatagtcaaccatttcaaatgagcccgtacttctgatcatccaagtccagtgatagacatgagagtaaaggtctgcttggttattgcagcccctgccacttgagtcatagtccgctgtctacatattctaaggtgaaggtctagacattttgaagaagagacaagccttctcatagtgccctgtctgaattactgacccacagaatctggaagcataataaagtactgttgttttacacccactagggcctattggggtgggggttgggggaggaggaacatcaggaagaatagctagtagatgttgggcttaatacctaggtgatgggctgatctgtgcatcagaccaccatggcacatgtttaccaatgtaacygcacattctgcacatgtacttcagaacttaaaagttgaagaaaaaatacacaaaataaaataaaataaaatattgttgttttgtatctctgagttttggactcagggtgttttaaagatcaatgcataactaaaatagaattatttagcacatacataaggaaagtcttttactagcttagtttttattttcttagcatcattatttatagtagccaaaagatagaaaaaaacccaaatgttcatcaatgaataaataaatagacaaaaggtggtttagtcatgtaatcaaatattatttaactattaaagggaataaagtactgatacgtacaacatgtatgagtcttgaaattatgctaagtaaaagaaaccaatcacaaaagatcccatattatataatgccattcagtcgaaagtccagaataggaaaatatacagatgcaggaagaagattaatagatgcttaggctggggtggggagaaaggtgggatgatgggggaatagggaggtgatatctaatggatatggggtttctttttgaagtgataaaatgttctacaattgacagtggtgatggttgcacatgtctgtggaatatattaaaaatcatttaattgaacactaaatgagtgaattgtatattatgtgaactatatctcaattaaagcatttaaggcaaaaacaagttacatatgacatttttccttatagaatatgtaacatctgtgtatatttttcataattttattataccttgtagtaacactattagctcagtcatctttaattctggtgaggtataaataaaataccaaaagctttacatcatttcacttttgttgactattacttattgagaaactttttactctttggatgagacatgataggataggctatgctgtagcatctacaatgtaagtttcatgaaaggttcatttctcggttcacattacatgactaattgaatttaaaaatgcagagtgaggtgaggatagttttcatgtagtctctcaggaatacaagctagtggagtatctaacactaaacatgtgtctttcaagtccctcacttaggaagaaaagagacacgaagagccttcttttacatatgaatattcaactgttccaaaatgattagttgaaaagataatcctaatctttttttttcagtctttaagtgctcttttcttttattctcagccccctttattgttattattattttcatttcattattattatactttaagttctagggtacatgtgcacaacgtgcaggtttgttacatatgtatacatgtgccatgttggtgtgctgcacccattaactcgtcagattttatgtttctttatcctggcttgataaaacccattgtctcaggacttttcttctaaatagaaaagtagtctgaaggctcgtcctgattcattttaagactgtagtatttctcttctgccagttaatatgttttcactttttctattttctttttatatccaatacatttcagtatgaaattttgtgatggtccactagtctgatgtgcacaatttagccaggaataaatattagtggattcaaaataggcactcaaactatctgtccagattttttaagtgttgttggtttttttctttctttttttttttttttcaaatttcaactgatgaatgaaagtagctgcctagagaataatgaggtgggtgccaaacctgggttcattgaaggcgttatagcacctgtgccatgctataacttagataagtgaccttatctaagcccatggcttcaaatgccactgaaactggtgaatttatcttttaggaatggaagggctatagagatatttgatgaaagaaaactaagaggatttgtcaccagaacatctaccttttaaaagggggctaaagaaaattctctagccaagaaaaataaaaaagaaagtttcaaacaaaaagattaaagaaaacacaatggaaaggaagaatgaataaattcatcttccttttcttcttcagtttggtaaatgtatttgacagttgaagttacmattatgacattatcagctgtgattgtaaacttgatttcagtaacatttgaagccatgggcttagacaaggtcacttaggaatagtgtagatatcaggacaagtaagacctctgagacagccatgtgggaactcgacatagcaagcaagcgatggggagccccacccagtgactgtcttcactctagcagctctcagtgaaggcttctgtattaggccattcttgtgttgccataaagaaatagaggggccctgcatggtggctcacacctgtaatcccagcactttgagaggcagaggcgggcggatcacgaagtcaggagattgagaccatcctggccaacacggtgaaaccctgtctctactaaaaatacaaaaaattagccgggcgtggtggcgggtgcctgtagtcccacctactcagcaggcagaggcaggagaatcacttgaagccgggaggtggaggttgcagtgagccaagatcgcgccactgcactccagcctgatgacagagcgagactccatctcaaaaaaaataaaaaaataaaaaataaaggtaattaataaaagagatttaattagctcatagttctgcagggtgtacaggcatggcactagtatctgattagcttctgatgaggcctctggaagcttacaatcatggcaagaggcaaagggggaggaggcgtgtcacatggtgagagtgggagcaagtagaggaggcgccacacacattcaaacaaccagatcttgcatgaactcagagcaagaactcactaatcaccgagagaatggtgttaaaccaggagtgtccaatcttttggcttccctaggccacgccggaagaaaaagaattgtcttgggccatacaaaaaaatatactaacgatgggtgatgagctaaaacaaattgccaaaaaactcaatgttttaagaaagtttatgaatttgtaytgggtcatattcaaagccattctgggctgcatgcagaatgctggccatgtgttggacaagcttctgctacaccattcatgaggaatctgccccatgatccaatcacctcctaccaggtgctatcacaacatcgrgaatcacatttcaacatgaggttttcaggggacaaacatccaaaccatatcagcttccctgtgccaagcatggatggagctgagagctttatatgggttacttacaaaatatacatgttttatacaataatattaatagtacaaaataattactttgtaccaaaaattaattgtacaaaatattaaaatatttaacataacatttgtacaatgtatataaaaatataaatatcccataaaatttgataatagcatatgctattttatttctataatatagacactcttcaatactcagcaactttgttcacattagaccacttttatttgtaattattgatatgttgggtcacaaacctgccattttactttrtgatttctgcttatccgtttttttttctttttttgtaattgttgttttgtacgccttgctttcatgtgtgttactttaattttctttttttagaattccattgaggtttatctgtggtatttttgagtatatctctgtgtgcagacatcttagtggatgctgtaggttttacagcacatgtaataacttatcatggtttaatagggtcaaaattttagtactttgaaagatgtacggaaaccttattccttgattccctatatgtctctttaccctcctctgttccttatatagttgtcttaaatatttacctatatacacttaaaatcgcatctgataatgtcataattttaacttcagctgtcaaataaatttaccaaactgaagaggaaaaggaagatgaagttattcattttttccctttccattgtgttttctttaattttggtgttttaaagtttcttttttaatcttttttctttttttttttcctggatagagaattttcttgagcccctttttaaaaggtagaccttctggtgacaaatcctctcagctttctttcatcaaatgtctttatagcccttccattcctaaaagacaaatataccagatataaaaaccagaattgaaagttattttatttcatcacatagacagtgttgtgccacttttctatggctttcatctatttctgatgtttcctgcttccatttgtattgttttctctcctatagatgagctatttcctctagctgctttcaaaatttgttctttcttttaattttcagatattttaccatggtataccttagtttggattctttgtgtttgtcttggttagttttatgcactgaaagtttgtgtcccctcaaaattcatatgtagacatcctaaattcaatgtgatgttatttggaggttaggcctttgggaggtaattagggttagattaagtcatgagggtggggccctcatgttgagatcagaggccttataaaaaaaaaaaagagagagagagagggagaaggagacaagagatatctttttcttttctccaacatgtgaggatacaatgagatgatgtccatctatagccaaaaaatgtcttcagcagaactcatctgtgctggcattctgatcacrgtcttccagcctccagtattgtgagcaacacatttttgtttttataaaccacccattctatggtattctgatacagtagcctaaaatggctaagagattttgggtttgcttgaatttaggaatctgtgggtttttgcctattgccaaattaaggaagttttcagtctttgagacctttctcaaagttgcccatttcttctctccttctgggactctgataacacaaaaattaggccttcagttataatactacaggtccctgaggctgtgtttatagttttttcctgcttaccttcatgaattttttatgtggttattgtaagtttcagttctaaaatgtccattcagttctttcatatattttaattttttggctgagataatttttaaatttgtttcatatatgtttgtaagcaatatactggaagcatttttatgatgactgctttaaaatattttctgaataattccaacatctttgtcatttttgttctggaatcttctaattaccttttacattcaagttgagatttttcctggttctttgtataccaaatgatttctaaatgaaccaggacattttaggcattatgagactctagaacttatttaccttttctgtcttagctagcttcctcagacactactccagcaaggcaagggagtgagggagggacactgcattactgccaggtgatgatagaaataaaggtttcctctcaatctctgttgacacctaggcaggcggaggttcctcattactgctggctggagggtggattctgggtcaccactgggcctccactgatagcctgtctcggaggaagaagtgacttgttactgtttcccacatggcctccacaagcaccacctggtatggaaaggagggtgcttcttcattgctgcttttagagtagatccagctccccatttgctctccagtcatatcaaggtgtggaaggagagtgaggggcttattaccacaagttggggatgaaagttccaacttctgctattctgagatactattctggaggagggttgggacaccttgtcacagcctggctggtatgaagatctaaagatctaagctcttcacttgaggtaatagtgttttctgtggtacttgactacagtagagtggttattgtcgaaatgttttctgccttggtagactatttccttgacctttgcctaaaataataggcttttgttgggaaattctcatatgtgcctgttagtatttctatgttgatggcattttcagctaaaagtctgcaaattataaagcagaaaagaaaacttagaggattcatcactatacaatttattaagtccctaccacatctgccttggtctctccaggtctgagttttcatatattttatatataatgttcagggtttatagtttttcttagtagaaggaatagggcaaaatacatttactccatttttctggaagcagaaattggtttactttctgtaagaaagcagttggtgaatttctgtctaaattctctgccttttcaagaggaactgggctttacttctcagataacaactgagcaacgatagacctacaggtggcattactctctgtataggtagagaataggctgaatattaaatgttaaggagcagaatcattggaatttaaatgaggaaggagacttagtttttattcacgttaaccagccacctgatgacatgcaacagtgcgtttgttcatcaacataccttttagatggcctttctgcttcttttttgaatggctttaatgctaaagaaagcaagtgtttatcaaataatctattttttagataattcattattagaagttaattcattattagaaagataatttattattagaaggtaattcattattagaaagaacaaaacgagtcttttttaataaaagaataaataaatttaaatgtattgaacttttattgttgtatgtcatgtagggtaattttgtatacatgttgcattttacaagacttaaatcgtgtaattttatatacatcttgtagggtaattttatatacattttataaggtaattttatatatattatgcattwaattcttgtaagtagccctctgccttagccagttcgagctgctattaacaaaatatcttatcttgggtaatttataaataatataaatggatttgtcatagctctggaggctggaaagttgaagattgagatggtaccagatttggggttgagtgagagcccattccaaacagacaatttctcctggcttctctctcatgaggcagaagtatgaaagaaacatgaacattgagtccctacatgtcaaaagagatggaacagctcagcagcctttgggagcttctttttgtagggaaattgatcccattcatgaaagcagagtccacacgacttagtcacttcccccaaagactccatctcttaatactattgcatagggaattaagtttcaacataaatttattttgtagagacataaacattcaaactatagcattctgtccctggtcatcccccgaaatatatggtcttctcacatactaagtacatttatttcatctcccaaatcccaaagtcttaactcattccagcatccactttaaaatctaaatccaaagtcttatctaaatatcatcaaaatcagatatggtgtggccaattttctaatattgaaccatctttaacatcctcatcctctttcaacgtggtttattattcttttagcatactgttcgtttgtttatgtactattgaatagtttccctaacagagtatccttgctgtcctatatattttgtttaatgaaactcagaatgaattcagaaacttgttgtttcctgtacttaaaaaatctaaaaaagaattatgtgctttttaatgataaagattagatattaaaattttctgtattcagcgacattggaggtgataatgagaggtagctggagacagttacatatcaaattcttttgcttcttagggttattttctattcaactttgcctcagcaacttgagttaaatttggtagtctatattatctgacaataatactgatattgctggaatttttacaatcagaacagagttttactcaaatttcttgccctttaaagtacattatgctgcaccctttatgaaatccactcaagtttttaaaaagaatggtgaacgacttagggaggaagagagctgagcaatgaaaaaagaggagaaaagagcatagtgagttttatagagaagagatctagaactacatttatgcccctagaaaccaggattaatagttttggaaattttaagaattccccagcacttgcaactccctctcatttgttatatattccttgttttcctagagttacaagaatatcaatgaaagatgtaaaaataattttaagaatttgcatttgtgctatgcaatctaggacagaaggggaacaatggaactctttctccttggcagctggctttattaagataaaggaggagggaagcctgctggaagcatcaatgagcaagagtcccagatattcttagattgtattaatggccctcaaattctagactcagaaacacccacaaagagaagcaacaatcagaaattgcatgctattaatattttattggtatactgaagaaagagttatgaccacattatttcaatgtcatggctttctgaaggaagttatcttcttatttattttctgaaacaaaaaaaaaaaccaaggaaatttatacacaacatacaacatggcaaaacttatctaattccttgatgatattactgaagtaaattattgctttcaagattaagaaaacagatttttttatggtgtttatgttttggttactgttcaaaacattcaaggttatatttatgaaaatgactgcaacttgaacctgtagtagtgaaaaactaatacaagcctacatatcaattaacagtggttgactgaggaaatcatggtacagtcacacaagagaatagtatacaattgtaacaacaaaagaaaaatgtacaaataaatcaccaagaagatctataggtctccgtgaaatgataaagttgtctaagacatgtattatttgaaataagcaaatacagatctgcatataaaataatatgtcatttgtgggaaaaataatgacgtatgcttatatacatataaatatttccaggaggatgttcaaaaaattaagggtggtgacttttggtgaagggtgtgggtaagtaggataaggcgtcactttaagatttagcttcataccattctgttcagttagatttttttttccttgagcatgtactaatttcaaaataagtattttaaaaattaaataagatataagagcatcaagttcaagtatcatttagcagggacactggacctgagaggctagtgtgaggcaggactgagcaaagagtcctctggcggaaacctgagagaaacctgagatggagagtccttgggtttgagaaggcagactcaaagacaggaggcagagcaccaaagggagagcacaccccacttcctcattaccaactcattttaatgagacaagtcatcttaagaaaaaagttggggaggtcagtatttcaaaagataagaattctttgaaccacttgttaaaaatacaaggacttgcaaccttatccaagaatatctgaatacaaatctttagaaatggggtccaggattatgtaatttcaacatatttccaattgatttgtgaacacgataaagtttgggaatggtagcagtttgggcatttaatggagaatgaactggaatcatacctgccactgaattctagattaccagagtggttgctcctggggatgtcttgctggtctgtccctcyggaagaatgatgatgcttcctgcaggctgacagaaggaaatcggggtagagagagttgacggtgtcctcgtyggggtggtcgttgctgattttgaaaaggaggtsggggaggatggcggtgatggcctcctggttttggtggtctctgctgaggaccatcatcttggttaccactatcaccagggggtctaggtaggagtccttcaggaggaggtctctggggtccctgatctggtctctgacttgagtcctctacatctgtgtgagtaattaatggacaagaatgcatgagctcagtgaagaaaaactctcctctctttatacttctctcaccttaccacacagccctgttctccccaaacctgctgcttgactgtcaacttcttttgtgcccactgttttttttttctttttatgcagctctcaacttaatccatgtaagagtgatatggaaagtctcatttatttgctcctgtgacaagtatgtttccttaaatgaaaagaggggttcttgcatatcttagagttgccagaggatgtctccaaggacagaaaaaaaaaaaaaagcaaaagcattatagctttcagttatgttactggttattttttatttttattttttggttgctgtaatgacttacaaactgtgactccatctctgggcacctaagccctatgtggaaactagagctgatttcccaggctcctggaaccaagtagagaaatactaagagacagaagagaaagacaatgtgaaagcctgcacatgatcactaaacagctgtggcaactatttatcatctgtagtgacacagctgagtgggtcaacacagagaaaagacattcatgcagtgatttttttgttttgttttgtgttactccctgaagccacataaccgtgcgggggaacactgggggaagaaagaagcagttaaggatggaggagtcagaatgagaacacttctcatttgttcatcatctctcagcagtcattccagcctgggaaaaaagcctgcccactcctattgtcctcaaagccaggcatctctgtattcaagttggtggcctggctcatggtccccagaatcaaagatgggtaagaattgcctatatatttaggggcactaatattaatcaatgcctgacccctcttaccacctcctcccaaaaaaatgatgagaagaagacactgaaggaaactaaaaagaaattctagtggaaaaagraagaaaagaattggattgaggatcattgggatttacctggtatggtgaaagtaaagtcttcatagttcacatctaggaaaagaagcacaggatgaagtgaacattacctcataaatctttcagggctcatagtggtctatagggaaaggggtcttctggccacaccctgtgcatcccctaagttacctcatcaaccatgttctgtgaagctgctggaaggggaggaagatgttaggggaggcaggattgttactatcgctgagcatcaaccacgaattcaatagaagagtccctttttgtcatccttaggatccctcaaaccctaatgctaatttaggcacacttctctgggtattttcatgtcatattttagatctttaccttcttccttctttaaatattttgatcatattcacaagcttgcccaagaggagcaaccaggagtaaatatttggatataatcttacacatrctgcctgcaacatattgaaattttaaatgtgattggaagaaaaatgggaatttggggacctgatatttctataccactatgtagaaagacacaaatgtattatccagtcctctatgtctgacagtactctgatgtttgtttatctctttcattgattctgcatcccctgtacagcaaggacaccatcatcgctgtccactgagattactgtagcatcttcatagctggacttccctggatcagtcttgcattctccactgcatccttcacagcacagccaggtctttctaaaaatacaaatcttactttgtcattcctctaattgaaattctctattgggttccaagtgtatatcaaataaagtataaggccttggcatggaatgagggcacaacagatgtcatccttggaatgagagctccaaagccctacccttcttctcaacctccttcctcccctcctgctcttcygctgcagtggtgtagggtgaacccctgaggccctagaagagtcatggcccctcatcccactccccatctccttttttaaaaaaataatttttttaccattatctgtgctctgagctgagctcagagccagaaggaccactgagagcaggaccagcagcatcttgaaggaggctctggagttgctcccaactctgcgttgagagaaacatggcagctccctttataaacatgagcagaacaatggcacctttgagctccatactgggtggacctcaccacctgaaagrttaggttttgctttcctctcataaagttgaatgcgtctcttattactttttgggattttagcccagcaggatgtggtggtaggatgtggttaggtacaaactgtgacttgagcatagtttctgaagaaacagtatccaagcaatcagcacaaatactacaattgaagtttggtcatcatttgattttcaattgggttagacagttagtctttccccttcattggttgtctgtgtgcacacgtgcttacgtttgtatatgtttgtcagcagtgatcttatagccagaagtgaaaatgattaatatctctagctattagtgtagcataaattccatttttatagcatatatacctatatggatgatatgtagcttaatttcataataatatagagatcatttctgtttaatgttgagttgtgtgaggacaacacacacttgggcacacgtggatgacagaagttttaccctcaggctactctggcccaaagagattaagattctcctaatctagcattaaccagagatactttattgttgtagaacacaggtattaaaacattctatctttattaataycctggaggttagtaaggcaaaattggccacagaaagcaccattagatttctgcatcagaacagtgtgaatacacagttccttgaacaagccatgctattttatgtccctaagacttcttccatgatctttctcttttctagaatgttctatatgattcagtttaggtcttacttcttgtaccaaatattttaatcacactggttattgagtggacacaataatacaatctaattagatagtatgatagcctgttgaaagcctcaagtattacattgattttctattttttaattagtttccattctatttgcttctcagattgcctttaccaaagattattttctctgcaatattcttatactcattcttcttcactcttgtgctgaaccttacttgttgatatgttatattgtgaatcaatcctccctatgtctatgttttatatcttactgctttcttcatgcgttctgggagaaatctttatttgattttctaaacaaggttctgtacttctctttgcttgctttcttcttttttgtttttaaaatttggcaccaaggttttgtgtttctgaaaagtttggtagggtcctgagttggtagcttaatcttcacctgctgatttttctgtcctatctagtagttttctgcttatattttcatggaacccctagatcaatcagtatcaccagctgccacttttcattacaggcrttgtataggtctcgtattattgttacatttttgtacagggctggtgataatttgaggatagcttggttggaagtatgacagggtcgggggaatgtgactggaaatcttaaagacaggcctcttgaccattgtggataagtggatcctgtgctgtgcagatgaaggtctggtctggcaattctgaagggttggaggtaatattacaggaagattttctaatcaatggtgtttgttatggataactttactttggcaaagtgaccaaaaaataaatattttctctggcataattatggacatattttgaaggtgaaatatattatgagttagcaattcttctctatgtgggaagcagaagagttctagctgtgctttagggttttatgggtgagagagagtagttgtttgggcctacagacccagctgtgttactaggattgctgcctctgatttcaccagacactgtttaacatgggaagtggagataagtagttctgcctaggtggcttatggtagaccrtcaggtaggaaaggaaggtcagcgagaaggagcasaggggcgtgccatgcagacatgattcactgtgtgggtggctgaggaaactgcagtcctggtggaaggcaggcttctccttggctggtgagtgcaggaagacaacaggtgatgcctgcaaatatcactcagctcagacccttaccctgacattctccagtgtaagcaatgagagaaagagattaatgtatcaggaaataataaacatcagctatgatctcaccacacacaaccacaacagaggtgacggaggagctgaaacagacactgtcagtgagtgagggtggggtcaaatcgagaagcaggactgcagcaggagcttaggcacttgtaggtgagtggacactctcagcaatccacttgccttttacaacagatgaaaacttaacatacccctaatataattcttgatttctacttcctaaaacctgctctccttcatactaatttgttatggctaccctaaaaaaatgccccacaagtggcttaaacaacagaaatttactttctcatagttctggagcttgaagtacaagattaaggtgtcaacaggtttggtgtcttctgaggccctgtctccttcacttctagatggccggttcttgctgtatcttcacatggggttttatctgtagacgtgcatccctggtacccctctgtggtctgtgctaaygttcttttcttatgaggacaggtgtcagatgggattagcaccaaccctatcagcttcattttaacctaatcacctctttaaaggccatgctgcaaatagagtcacattcagtggtatcgggggtaagggattcaacatgagagtttggagggaacacaatttagctgataacacctcacaatcttttctcagttcatgacatttgtttcactcaaccattcaaaaacataagtgtcactcttgattgtttagtctcctccgtgtactgcccttagcaaatccaattggttctaccttcaaaagatatcccatatatgatcagtttcataatctctatcagaaggycctgagtcaagccatgattctccctcctggaggactttcaacagtctccagctgatcttggtgacattcctgcccctcaccacatcccawgcagttctccttacaacagccagagtgatcttttaaaaatagaatttagaacatcagcaagatggctgactagagttccctggcactcatttccccacaaaaagaaatcaagaaaacaaacaattttatgtcagccagtgtgatttaaaaagtatgctggagaccaccaggggaacagaaacacctctgtgaagtacagaaactcaatatagcatcctgcctctgacatactctctcttcagtcaaggttggctcagggtcatcagtaactccattctacaggaaaaagtaagctgtagttccccagtggtccacattgccataaaaaatgtcaacaatctttgccccactgttctcactggcacaaaaaccagtctggagagcagttgggatttccaaactgcattgccttacatagtaagagaccaccttgagcaccctctgcccctgcaatgtaaggtgctatggctcagtgccatctccaaactgaacctacatagagagtgtgtcttgctttgagcatcagtagcacctggctctctatcacttgaggccccaccatcattccaacacattcatacaggtatctgcagcaccatgaccctagcttcccagagcctagccagataaactaatcaagaccccggcatccgaacccatgtggtgcaccaccaatccagggaagaagtgaacagcagggaagccacccatctgcctactagccacgacacccacatgcacccacacctcacaaccagctagtctgctgagcctgtgcatgctggtgcccagcctgaaaactggtcctgtggtgggcccacccccaggactacagcctgcttgggccacaacaactctgagtttgtgcatggtctaataattggtcctgcagtgaccctgcctcctcagatgggactctgcagagatggatggccctgctacacctgtgagcactgacagcaacccgcccacccagcaggaagacmgcagtgcatgtaagtgcacacaccttgagaaaaggctcttcccactgctgctggtggcacagttgctgctgtcaccaccgggggctgcagcagtgaaatgccagttggacccagcaaagtggcaggatcctcagcattctagcatatgcagtgttctgcacctcaggcactggaaaggctgtgaaccagacatagggagccaaagcacatgctttccagaaccagagagctgcctccctgtggctgctgacacagacagcaatgtcacccccgcaacacagcagcagagatgctgcacacttgcatgcaacctggggacaggccctctccatctgctgctgagtctgctgatgcagctgggggccagagcatgtgccactggcagtgacctgacttccaccagcagcagagccactgtgaacttgcacgtaccctgaggactggcttatgctgctgccagaagccaaagtgtgctccacattgccagagagctgcctgctagtggctgctgccactgacaataaccacaccctgccctagcagcacagctgcagcaaatttgcatgtgcctcgaggacaggctttcttcaggtattgctcctgctattgggagatccaaggattaccccatccaacttaccacagccaacatccatgtacataactagggggactgaggacaggcctgccaagcctggttccatcatcccagtgcccaggcacactacccaggggtgtggcaatcatcctgctttgtccaccaccactggcatttgcacattcctttaggaggactgagaatgggcccaaccagcctgacagtagcactgtagccagaaacaatatgcatgcaacatctgaaggtctggagactggcccccagcccatcacaaccacctctaacaccagagcttgcaacttgagaatctgagggttgtccaaccaagctacagaaattgcccatggcaagcacattcccagaggcctaaaggcccacccaccctttcagcctaccattgcaactgctagtacccaggtaagctacttaaagcccccagaattgttctgcttaaagctgctaaaactggtacaaacatatgttgcctaggtgccaaatataggcactctcagcccactgttacccctactggggcccaagaactggcccacctaaaatctctgtccccaggaaaacctcactacagcctccaatcacaactacagcctaagccactgaggaagtcacagacaccacttatgctgttaatagctgaaggaataatataagaccaccttactgtacacacacagaatcaaagccaaagtgtcctactgaatcaacaccacagatacatcttcagaaagaaaagttaatgttttggatctatgtcactgcccaaatctcatgttgaattataatctccaatgttgggggaggggcttcattggaggtaattggatcatgggggtggatccttcatgaatggtttagcaccatcccctgcgtactattcttatgacratgagtgagttctcatgagatttgcttgtttaaaagtgtgtgtcacctcccccccacccagtccttctcctgctatgtaagatgcctgctcctgctttgccatttgccatgagcaaaagctccctgaggcctccccagaagcagatgtcactatgcttcctgtacaacctatgaaactgtgagccaattaaacctcttttcttcataaattacccactctcaggtacttctttatagcaatgtgagaatgaactgatacagaaaattggtaccgaagagtagggcattgctataaagatactaaaaatgtggaagcgattttggagatgggtaatgagcagaggttagaagagtttggaggactcagaagacaggaagataagggaaaatttggaacttcctaaaaacttgtaaattgtgaccaaaatgctaatactgatatggaaaatgaagtctgggctgaggagatctcagataaaaataaggaacttattgggaacaactggagcagtcacttttgttatgctttagcacagagcctgggtgcattgttcccctcctttagggacttgtggaactttgaacttgtgagtgatgatttagggtatctggtggaagaaatttctaagcagcaaagtgttcaaaatatgacctggctgcttctaacaacctaagctcatatgcctaagcaaagaaatgagctaaaactcaaatttgtattwaaaagggaagcagagtgtaaaagtttggaaaacttgcagcctggccatgtggtagaaaaaaaattcccattttctagagaagaatttaccctagctgcagaaatttgcatgagtaaagaataaccaaatgttaacagccaagacaatgggagaaagacattgaaggcatttcagagactttcgtagccacacccacatcacaggcctggagtcctaggagggcagaatggtttcctggtccaggcgcagggccccactgacctgcacagcctccaaacactgtttcctgcatcccagctgctccagctccagctgtggctcaaaggggtccagctgcaacttgggctgctgcttcagaggatgccagccataagctttggcagcttccatgtggtgttaagtctgtgagtgtgcagagtgcaagagttgaggtttgggagcctctcttttgatttcagaggatctacagaaaagcctaaatgtccaggcagaagcctgctgcagaggcagtgccctcacagagaacctctactagggcagtgcaaagggaaaatgtggagttggaacccctacacagagtccccactggggcactgcctagtggagctgtgagaagagagctgtcatcatgcagaccccagaatgacagatcctctggcagcttgcaccatgcacctggaaaagctgcaggcactcaatgtcagcccttgagagaagctgtgggaaatgaaccctgcaaagctacaggggtggaactgaaaaggccttgggaacccaccccttccatcagtatgcctggttgtgaaacatagaaagtcaaatgaggttattttgcagctttaagatttaatgacttccctgctggtttcagatttgcatggggtctgtagcccctttctttttacagctttctcttttttggaacaggagtgtttacccaatgcttgtactccccttgtatcttggaagtaactgttttttgaatttacaggctcataggtgaaagagactagccttgtctgagatcagcctttggactttcgacttttgagctaatgctgaaatgatttaagactttgggggactcttgggaaggcatgattgtattttgaaatgtgagaaggacatgagatttgggagtagtgatgggctgaatgacatggtttggatctgtgtccccacccaaatctcatgttgaattgtaatccccagtgttggggaagactggcatgttgggaggtgactggatcatgagggcagattcttcataactggtttagtactattctctcactgctgttctcatgatggtgagtaagttctcatgagatcttgttgtttaaaagtgtgttgcatctcgcccccacttggtcctgatcctgccatgtaagactcctgctccagctttgccttttgccacaagtaaaagctccttaaggtttccccagaagcatatgcttctatgcttcctgtacagcctgcggaaccatgagccaattaaacctttttttgaaaaataaattactcactctcaggtatttctttatagcaatgtgagaatggactgatacaaaaatcttcccctatgaaagccaatttaaaaaacagaagaagcaactatttcaccagatgcgcagacatcaatgtaaggacacaggaaacatgaaaaagcaagaaaatatgacacctccaaatcaacacaatactcctccagcagtagattccaatgaaaaagaaatttatgtaatgttggggaaaatatttaaaaaatgatactaatggagctcagtgagatagaagagaacacaggtaaaaaatagaaagaaaccagaaaaccatttcaggatattaaagagaaattcaacaatgaaatggatatcataaaaaagaatcaaacagaaacgctggagataaataaatcaataaatgaaagaaaaatacatctgaaagcttcraaaatagaataggtcartgagaagaaagaatatcagaacttgaaaacaaatattttaaataacccagtcagacaaaaaaagagggataaaatgtgaaaaagatgaacaaatcctacatgacatatgggatgccataaagcaaccaaatttttgaatttgggtttttcccaaaggcaaaatgaaaggcaaaaacataaaaaacctatataatgaaataatagaagaaaacctctcaagtctagcaagagagttaaacacctagatacaggaagcttagatagatacaacccaaaaatattttcttcatgtcacattatactcaaactgtcaaaagtcaaagagaaaaacactatagaagtggcagagcaatatggtggaatagaaggctccaccaatcatcccacccacaggaacaccaaatttaacaactgcctacataatcaaagcacttccataagaaccaaaaatcaggtgatcactcaaagtacctgcttttaacttcatattactgaaagaggtactgaagagggtaggaaagacagtcttgaattgccatcgccacccttgtcttaacccagcagcaactacatagaatggagaatctgtagacttggggagggaaagtgtggtgattttgaaacttcgcattgaaatcagtgctgccttgtgacaatggaaggcaaaaccggggtgaactcagctgatgtccacccacagagggagcatatagaccagccctagccagaagagaactgtacattccagcagccagaacttgagttctggcaagccttgtcactgtaggctaaagtagtctgggtctctaaataaatttgaaaggcagtctaggccacaaggactacaaatcctaggtgagtcctagtgctcagctgggctcagggcaagtagactggtgggggcggtgggtacatgacctactgaaacatcagctggggtggctaaagcagtacttgggccatccctccctcaacccccagctacacagcttatggctccaaaagagaccacttccttccacatgaggagaggagaaggaagagtgaggaggactttgtctggcatcttggataccagcttagcctcagtaggatagagctctggtcagagtcatgaagccctgatttcagactctagctcccagatgacatttctagacacacactgggctggaaggaaacctactgcattgaaaggaagagccaagtaatgaaagaaccaatcacctgctgattaaagagcacttgggccttgaataacaagcggtgatatccaggtagtatgctgtgggccttgagtgagactctgagatgtgctggtttccagtgagacccaacacattcctagctgtggtgggtatggtcagagattcctcctgcctgagaaaagcagagagaaaaagtaaaggggactttgtcttgaaccttaggtaccaggtcagccacagagaagtataacaccaagtgggctcttgaggtccccaattccaggccctggctcttggacagcatttatggacctgctctggtccagacggggagcccaccactataaaaggtgagtcctagatctggcagcattattcaccacaggctgaatgaagagcccttggtccttaagtgagcatcagtggtagcctgagaatattcccataggcttgtggtgatggtggccagggggcaaggtgcctgcatatgaaaagggaagattagaatgggaagaattgcatctactggtttgagtgccagcttaacagcagtacaatagaacacaaggtaaatttccaaagttttggactctggtccgtggctcctggacagcatttttggacctgcctggagctaagggatcttgctgctatgaagagaagcacataagcctatccgtaagccccaaagcagtactaagaaggaagattattgctatatgtgcctacatcaaaaaataaaaaaacttcacataaacaatctaatgatgcatcttaaagaactagaaaagcaagagcaaaccaaacccgaaattagtagaaaaaagaaataaagactagagcataaataaatgaaattaaaattaaaaaatacaacagaagaatgaaacaaaaagtttgttttttgagaagatgaacaaaattgacaaaccttttgacagactaaccaggaaaacaagagagaaaacccaaataaataaaattagagatgaaaaaggagatattacaacctacaccacagaaattcaggggattattagagactactgtgagcaactatatgctaataaattgaagaaactgataaattcctagacaaatgtaacctgccaagattgaactatacagaaatccaaaaacctgaatagacmaataacaagtgatgagatcaaagccataataaaaactgtcctagcaaacaaaagaccaggacctgatgacttcaatgctaaattttaccaaatatctaaagaagaactaatactgatccttctcaaactattctgaaaaatagaaagggaaggaatactttcaaactcatttggtgaggtgaatattaccctaatatgaaaactagacaaagacacattaaaaaaaatacaggccaatattttggatgaacattgatacaaaaattctcaacaaaatgctagcaaacagaatgcaacagcccattaaaaatacaattcatcattactatgtggcatttatcccatggatgcaagaataattcaacatgtgcaaaccaatgaatgttgataaatcatataaacagaaggaaggacaaaactaatatgcattgcaatagataatgaaaatcatttgataaaattcaacattccatcatgataaaaatcatcaaaaactgggcatagaaggaaaatgcatcaacattattaaaaccatatatgacagacccacacctaatatcatactgaatggggaaaaactgaaagctttcctctaagatctggaacatgacaaggatgctcactgtcatcattgttattcagcatagtactggaagttctaactacagcaatcagatgaaagaaaagagaacggaagggaagggaagggaagggaagggaaagggagggaaggggagggaaggggaggggagggcaggggagggcaggggaggggaggggaggggaggggaggggaggggagggaaaagaaaagagagcatccaaaatggaaaggaaggagtcaaattatctttgtttgcagatgatgaaactttatgtttggaaaaaaataaagactccacaaaaatgtattagaactgatagaaacattcagtaaaatttcaggatacaaaatcaacatacaaaattcagtaacatttttatatgcccacagggaacagtctgaaaaagatcaagaaagtattcttatttacaatagctacaagtaagataaaatacctaggaattaaccaaagaagtgaaagatgaaaagtataaaagtataaaacattggtgcaagaaattgaagataacacactaaaatggaaagacattctatgttcacggattggaagaatcagttttgttaaaatgtccatactacccaaagcactctgcagattcaatgcaatccctatcaaagtatcaaygacattcttcacagaaacagaaaatacaattctaaaattcatatggtaccacaaaagactcagaatagccaaagctgtcctaagcaaaaagaacaaatttggaggaatcacattacctgactttaaattgtcttaaatactacagaactatggtaaccaaaatggcatgacactggcatagaaacagacatktttggactgtgagcctggcctctatgaaccatcgtttcagctcctgattggtccagagccaaggccctgggccaagctgagtcacaagttctccaagacagcccatggactaagtgcattccttccccttcccagtccataaacaccctggaccccagcctcatagagggcaatccatttgggtccctctttccgctggcagagagctttcttcttttgtttgttaaacttatgctttaacctcacattgtgtctgtgcttctcaatcatcttggacgtaggacaaagaactycagatattatctcagacaataagagactgctatctgggtccgttggcaaaactacaacattacaacaagaaaactttggggaaactctccagaacaccatagtgggcaaagatttcttgagtaatacctcacaagcactggcaactaaagcaaaattaaaattaaaaaaaaacttcaaagataaaaattattaaaaagagaaaagcatccagtcatatgtaagggaactatcaccagatcaaaagagaatttatcaacagaaagtttataggctaggagagaatagtatggaatattcaaagttctggaagaaacactttcagtcatacatactatactcagaaatgttatccttcataaataaagaggaaataaaatctttcacagataagcaaaagctttagactaaccttacaacaagtgctcaagggagttctacatctrgaagcaaacagatgataatcactattttgaaaatacataaatactcactgttagagaagacacacaaagaataaagagaatcaagccttattatttcagaaaactaaaagaaatgataaacaataagagaggaagaaaggaagaaagggacatataaaacaaccaggaaacaatgagcaatatagaaaaaccaaaacctcacatgtgaataataaccctgaggtaaacaaattaaattccccatttaaaagatatataagtcatataaaagggaacctccattagattaacaacgaatttgtcagaagaaaccttacaggccaggagagaatgagatgacatattcaaagtattgaaacaaaaaaaatcttatcagccaagaatactatttccagcaaagctattcttcaaaaatgaagtagaaataatggcgttcctaaacaagaaaaactggaaattcatcactactacactggtcctacaagaaatcctgaaggaaattctatactttaaagcaaaaagacaatatggtccatcacaaaaacacacacaagtataaaactcactggtaaaccaaatacacaaatgaaaaagagaaaggattcaaattttaccactacataaaatcaacaaatgacaattataaacaataaaaaatatagaaaggtaaaaggacatatgaaataaccagaaaacaattaataaaatgacaagaataaatcctccggtagtaataagcttgatggtaaatgaactaaaattttcagtttaaagatatagactggcttaatggattttaaaaagcgtgacacaagtatatgctgccaataataaagtaaatttctctgtaaagacacatggacttaaagtgaagggatgaaaaatgatattctatgcaaatagaaacaaaaagtgagaagtactatacttgtatcagataaaacagattttaatttttaatttgcaaacagcaaaaagacacaaaaaaggtcatcatgtaagataaagggatcaattcagcaagagggataatacaattctaaatattcaaacaacactggagcacccagatatataaggcaaatattattagacataaagggggagatagattccaacagaataatagtgagggacttcaatgccccattctcagccttagacacataatccagagtgaaaattaagaaataaacattggattttaactgcactttagacatgtctcaaaaaaaagtatacgaatgtccagtaggtatataaaaaatgctcaacatcactcatcatcagggaaatgcaaattaaaaacacaatatcatccttctccagttagaatgggtattattaaaaagaaaaaaaaaacagatgctggtgaggattcaaggaaaaactcttacataccgttggtgggaatgtaaattagtacagtcactatggaaacaatatggagatttctcaaaataactaaaaatggaatgaccatatgatccagcaatttcrcttctggctatttatccaaagaaacagaaatgaggacatcaaagggatacctatattcaaatgttgactgcagcactattcaccatagcaaagatatggaatcaacctaagtgtccgtcagtggacaaatggattaaaaaaaaacagtggtatatatacacaatgtaatactattcagccataaaaaaagaataaaatcatgtaatttgtagcaacatggatggaactggagggcattatgttaagggaaataagccaggcacagaaaaacaaacagtgcatgttctcacttatgttgatcacacagaggtagagaatagaataatggctacaagagatggaccagtgtttgtgaggcaggaggacaagtatgaagagaggttcattaatgggttcaaacatacagttagaaggaataaattcaaatatttgataacagattagggtgactatgtttaacaatatttcaaaatagctagaagaaaggacttgaacagttccccaaacatagaaatgataaatactcaagatgacagataccctaacttgatcattatacattctatatgcttataacaaaatatcatgtgtcycataaatatgtacaaacattatgtatcaatttttaaaaatcaggattgatagctttactgctgaattctaccagacatttaaagaggaattgatactaattatcctgaaacaattccagatattgcagaggaagtaatacttccaaacgcattttacaaagccagcattaccctgattccaaaaccaaagatacaacaaataaaaaagccacaagccaacatccctgatgaatatcaatgcaaaaattcaacaagattttagcaaagtgaacgcagcagcacatgaaaacgatcattcactatgatcaagtgggttttattcaacatatacaaatcaataaatgtgatgcaccctattaacaaaatgaaggacaaaggccatatgatcatctctatagacacagagaaagtattttataaaattcaatatccctgcataagaaaagctcacaagaaattagacacacaagatatgtacctcaacacaaaaaggccatatatgacaaacccacargtaacatcatgcagaataaggaaaggtgaaagatttcctctaagattaggataaagataaggatgttcactttcatcactcctattcaacatagtattaaaagtattagctagatatactaggcaagagatagaaaytaaamaaattgaaattgaatagaaggaagtcaattgttcatcttttyggatgacatgatcttatttatagaaaactctaaagacttcaacaaaaaactgttagaataaatctggtaaagttgcagaatagaaaatcaatgtacaaaaattagtagcatttctgtatgctaatggtgaactatatgaaaaataattcagaaaacaatttcatttacaataaccaaaaaagaataaaatacttaggaataaacttaaccaaggagataaaagatctctaatactgcaaactatgaaacattgataaaagaaattgaaaaagatgcaaataaatgaaaagatactctatgtttatggattggaacaattaatattgtggaagtggccatactaatcaaaatgatcttcagatttaatgcaatcccaaacaaaataccaatcagcatacttcacagaaataaaaaaagcacacacatattttccgtctttgagtaatgtatgctctgaaaggggaaaaaggcattgagatacaaaagcacattataagatagaaagctctatgtgccatttcctgtcatttaccttgatattagatccaggaaactctctctatttttaggccaaattattagcaaacttaattgcccttcgccatgtaatttaacataaaacacaggttctgggaattaagatgtaaacatctttgtgaggcctatattttcctcctgcagagagaacaggtaatcttacatctctcaaatttgtttcagttgtgtatggagacagctatccctgatttggtaatgtttaaactagacttttgcaaaaggatatgtatgagtttatataaaatttgatagtattgcatgtatttatactgtgcaatatgtatatgcaatagtttaagtgacaaaactaagtggtacaaatttaccttgaggttggctgcatttgtaagttggggcagtcacttctttggagtgttgtgcagacttgggaatgagaagctgtagatttcattctaactctgccacttacagcaggacaaccacttgcaaagcccagctttctctattaaaataagaccctaaatcttcccaacaccaataatgaagatgacattctcagatcaggaaaatgaagggttcttcagaaggatcatcactgtgtcaggggcagcaactggagatctgaacaaaatagctacctgggcatccaatccctctactgtgaaatgcatgattctccagaccttttccaacacgcatagagctttctgatcgttttagtgcctactcttaagtatgaattgaatcaaaggttgaccagacaattgaagaaattctccatcaaatgagactcaaagaatcagaacaaagtgtaattctgaaggaaaagaggtaagataaacagcagaagaaacgtttacaagactataattaatatattctgatataaccataaaacataaaaggatgctatcaaatagaagattgaccagagaacacaaaagaatatgagcaattgtaaattaaattgataagttcaataaaatgtaaagttaaggaaatcccctatgaggtagggcaaaaaggcaaagatatggtccataatgtgaagacaattaaaaaattcacccaacatgaattttagaaaaagaaaacagagtatatattgggaaagacattatcaattaaatactgccatacattacccagaacttatggataattctctccataatgaaaaaagccattgattatctaaaagaccagatttaacattttcaggccccagtgcaggaagacaaatggaggctcacatactctatctctgaataaccatacattataaagtaaaatcgaccctaggttcaggttaggtttccatccaagtcctgaagcctgtcccttggagactgcccttctaacctggcctagagacagaagaatcatgtgtttccctgcaccaacactgactgatcctgcaagctgagaggtgggaaaatacggagtggcagggctgtctgctggagcagtgggcaggagctgagatgaggcccagcactgacctggccaagagacagaagaatcatgtgtttccctgcaccaaccctgactgatcctgcaagctgagaggtgggaaagtatggagagcctctaatgagttttcagttcagcaaatctagttaccagtccccagatttctgtttgatttttcaaaattatttcaatctctgttaaaattctctgataaatcaataaattgctttcctatgctatcttgcagatatctgatttccttaaaattgttattttgaattcttgatcagagagctaaccaactgtcatgtcattggggtcagtaactagtttggtacctttgtccttttgggaaggccatggctctttgcttgctgttgtttcctgtgggtatacttctatgtctttccatagaagggttattaattaattccagtttttcaggtctgggttgtgtttgttgttattgagtctatttgcttggcaaatcctcactgctgggctgttgcctcccttttgactctaggtggtgtctcaacctcacttttaccttgtctttagtaaacggttggagtattaactgtccgaaatgggaaatgtcccaaaggaattaccctggaagtatgagaaacttggctaggggttatggtctggtgacctaaggaatgtacctcctaaagcatggtgctattgaacatctaccctgatttggcttctcctttggccaagttatgaacagtgtccagaactggagatgatcttccctcctccctattttgtctcttgctctcttcaggaatattcctccctgaggacagagaatattcatcttccctaagggagtcataatgcatctcatgggctaaggaagaacaagtttcttgccagggaatccaaggtggtaaataatctgtttgagaacatcaatttcactttattcactctaaaatccatgaattgggggagattctctgcatgtgtggtgccaggaagaataggaaggagggacatcatggaggtggaagtcccatctcctactgtcttcttgatgattttccacttctctttggccctgagaaccatctcattttcatacttgagctatgtatttttcctgacatagatctcaaagctctatatttgtttttggtattctgtttgttggggtagtaagtcagcttgcctctacagcaacactttggaactagtgggtagctattttgttgagacaaccatatgctatctctgaaaccacactgacccttcagaaaattcctccctcttcctgacctgcaagaataataatcactgccgacactttggagctggtctgggttcatcccattccatccagcactgctggcacccawgtacttctctgatgggtctgaggacaaacctacacagcctgtgccaagaccattgccagtacgtacctgcatgtgacaccttggattcttaggactggcctacataggccattgccatcaccattaccaccagcacattcaacctggaagcctgagggttgtcttgctactgctattgctatcacccatgccaggcacattgcacaaagtctcaagaaccactcactcaccaggcccaccactgcaacttccagcaccacaggaaactccctggaggtacaataatttacccaactgaaactgtggatattggtgtcaatgtttgttgtctggaggctcaaagaccggcatgctcattccactgctgccactaacatgtgttgcagactggcccatctagtacccctgttcccatcaaaacctcacaaaaacttttactaacaacctcagtcttagcaactgaggaaatcacagaccactgatcccgactagagacaaagaaaccatacagatattatgctagtgtatacacccagaatcaaagctaaagtgctgtatgcaaccaacactacagatatatctatagaaaaaatagtgttcccctatgaaagccaatcaagaagaggctgttactccagacgtgcatatactaatatagggactcaataaacatgaagatgctagaaaacatgacacccctacaggaccacaattattcttcagcaggagattgcaacaaaaataaaatctatgaacttctaaaaaattcataaatatgatatcatagaagcttagttaaatataatagagcaaagataatcaatacaaaaatctgaaaaaaatcagaatatgaataagaaattcaccagatacctagatgtcatgagaaagaccaaacagatatcttggtagtaaagaattcaatgaataaagtaaaaaaaaaaaaatattttcaaaagcttcaacgatagactaggtaaggcagaagaaaaaaattcaccacttgaggactagatttctgaaataaaccagatagaaaatataataaatcatctaaataaagccagtattcaatataacataccatgtagttaccaaaggtttgattctgagtattccagaatactcaagaagaagagatgggcagaggcatgacaaaaattttaaactaagcacatgtaccctaaaacttaaagtataataataataaaataaaataaaaaaagaaaaaaaaataatagctgaaaatttgtcaagtcaagtctagcaagagatttagacattcaaatagaggacctcaatgatactcaaattgacacaaccccagaagtccttctccaaggcatacagtggtcaaactgtcaaaagccaaaagtcgttaattctaaaaacagtaagataaaagcatcgagtcatgataatggaaccctcatcagattaacagtgattttcactgtataaactgtgaaagagagataaaatcatatatttaaagtgttcaaagaaaaaaaatctgccagccaagagcactatcttcagcacaggcgaacttcaaaatgaagtaacaataaagtttttccctgaaaagcaaaaacagagaattcatcaccacaatgactgccccacaagatatgcttaagggaattctgctcctgaaagcaaaagtacaatatctaccgtcatgaaaacacaaaaaatttaaaatactccctagtacagcagacaaatgaagacttgaaatgatttaaattttactattatagaaaaatactaaaccacaataataaaaagtgagagaaaaagaaacaaagtatatgtaaaacaaacaaaaacaaataacaaaatgaagtaatttctcacatatgaataataatcttgattgaaaattgattaaattctccacttgaaagacatagactggctgagtgaatttttaaaaaatatcctaactatatgctgcttacaagaaactgacttcacctaataagacacatatagactgaaaatgaagggatagaagaaaatatcccatgtaaacagaaacaaaaacaagtcgaaataggtatattaacatcagataaaatagactctatgtcaaaaacagtaatgagagaaaaagaaggttattatttaagaatagaaagatcaatttagcatgaggatataacaaaactaaatatattcccccaacactagagtatacctagatacataaagctatcattatgacatctaaaaggataaatagattccaatacaatagtagtgtaaactttaacacctgactctcagcattaaacagattatttagacagaaaatctacaaagaaatattggacttaatcttaagaataaggggacccaatatacattatagacatttttatttaacagtggcaaaacataccatttttcttattagcctgtggaagattttctaatacagaccgtatgttaggccacaaaacaagtctcagtacattttgaaaaagcagtatactttattttcatataccacaatggataaaactaaaaatcaatattaagaggaactttggaaattgtaagaatacatggaaattaaacaacatgctcctgagcaaccactggttcaatgaagaaatttagaagaaaattaaaatgtttttgaaatatgacaatgtaaacacaacatacagcacaaatagtgctaagaggggagatgctctgaataaattctttcatccaaaagtagagagatttcaattaaacaacccagtgatccacctgagggaactagaaaactaaaaacaaactgaaccccaaattagtgaaaggaaaaatatagtaaaaataagagcagaaccaaacaactagaaactaaaaaaaaacaaacccaaactcaatgtaatgaaaagttggtttattgaaacaataaataaaattcctaagtgtctagctaggctatactatatatgtgtgtgtatatatatatatacacacacacacacgtatatatatatatgctatactatatatatagtatagatattgtgtatctatacatatataaaaatatatatatagacagaaaaaactgaatgaaacaaaatcagaaactaaaaagaagatattacaacttatatcatagaaatacaactgtatattttggacaataatacactaatgaaaccgtatgttttgaacaagtatacactataattgaacaccatggaaaaagattaattccctgacatatacaactcacacaaaatgagccaggaaagaagggtaaacctgaacagactaataatgagtaaagaaatagaatcagtaataaaaacgaaatctcccaacaaagcaaagtccaggcctagatggtttcactgatgaattctaccaaacttataaggaaaaaggaaaagcattcctcatcaaacaattccaacaaattcagagaagagaatacttcctaactaattttacaatgccaggaataccccaatgctaaaaacatacacgaacacaacaacaataactataacaaaaattagaggtcagtatttctgatgaacacagacacaaaaatcctcaagaaaatgttagcaaaccaaatctaagaacacatcagaaagataattagcaataatcaagtggtatttatcccagggatgcaagaatggttcagcatacatgaatcgataaatgtggtacatcacattaacagaataaagacaaaaccaaataagcatatgaatagatgwaggaaaaagcatttgataaaagttagcatccatttatgataaaagttcccaacgaactacacaaagaaggaatatacctctatataatgtaaccacatgtgacgaactcacacctaacatacagaatggggaaaactgaaagccatttctctaaaaactgaaataagacaccactcagtcaacattttactttatgtcatgtcctagcgagaagaatcaggcaagcaaaaaaaataaaagccatccaaattggaaaagaggaagttaaattgttcctgtttgcagacgacatagtcttatattaggaaaaacacactggggcctttcagagggtagagggtggaaggagaaagaggatcaagaaaaataactaatggtactaggcttgatacctgggtgatgaaataatctgtacgacaaacccccatgacacaagtttacctatgtgacaaacatacagttgtacgtctgaacttagaataaaagttaaaaaaattgttaacataaaaaaagaaaaatctaaactccaccaaaaaaatttaggactattcaataacattgcaggataaaatatcaatatgcaaaaattagtagcatttctatatactagcaataacccagcaggaatgaaaaatcagctatgaaattccctttacaaagctataaaaaattaattactcagtaatacatttaagcaagcagactgatgtttaccagctatatgactgaaaatgtcaggcaatcatattgagcttttgttttttcatctgaagagtaaacataatgcaaggaattattaaagggctaccataggaataaaagagctaatggtataaaacattattagtattattagtattgcatagtatctatgcaatagtgtaagtcagaaactgaaatggcagaaatctacttttaataaccatttacatttaatgtaattattggtatttttgagccatttttgtttttcatatttatactacttttgattgtttttctttttcctgatctatggattccttgaaaatgttttttgattccattttagttgatctgtaaattttttgcgtgactctctgtacagcattgttagtggttgctcygtgttacattaygcatacatascttttcacagcctagtgctgtgcacattttaccctattcagtaaaatatggaaaccttgctttcctgtctttttaactgctccccctttcccactgtttgtaacagaatcatattaaatatatgtctatgtgcatttagtgccacagtaaattttgtcatttttgctttgacataaatttattgtcttccaggtttgcagctcagaaatctgaactgggtctcactgcgttaaatccatgtctcaaggctgagttccttcctggagtctctagaagaaaagctcattatcttgccacattccttggccctcttccatctttaaagctagcaatggccagttgagccatttgaaactcatgcagaaaacgtgagaagaaagatattttgtgtttacctactttgtatttccaatttttgtttttggcttgttgtcattgttgttgttgttgctcattcttgttgttgttgctcattcttgatgttccagaaaaatcctattctattttttcctttatgattagtgaccttcatagaaccattttataagataggtctgttggaaagmaattctcttagatttttttttctgtcttctaagaatgcctgtattttctctttattgatgagtagttatattggacataaacatctggttgacattttttttctttcagcactttgaatattttagctacatcctattggttattctgctctctggtaataacaccactgttactcacattgtgttttccctatagctatggtgtcatttgtttcttgctgctttcaaaacattttttttagtttttagaaatttgactacagtgttgcttgcatggattttcttgggtatattctggttggcagttgctcatcttcttgcatctgtaggtttatgcccattgcaagtttggagaattttcagccattatgtctttgagttctctctcaatagcatcctcattgttcttcccttctgaagctcagattttatcattatcacattatttgttataacctttcttgttcataacagtatttaaaattttaccctgtgttcgagtatacagtttctattaatccagcctcaagaatactgactctttcctccatcatttcctttctgttagtgatcacaccaaataatattttatttaattttttacactacatatctcagtatcaaaatttctatgtcattatattatatagtttcttttttctgctgggaattttttttccatttaaattgagagtgtacacattgacctcataatggatgtttgtaacacctgcttcagtgagattgaaaatctcaccgttttaatatccagattgtttcaaggttatcatctcttgattatttaactccttgagaattggtcgattgtttctgattttataaagtatgttgagtaattttctattttatcccacacacaggactttctctgtttacagtacacaataagttcaatgaaggaagttttggacattggagggtagaggccttcttgcttaattgagatccactcactggttcagatagcaggggattttgtcccactaacatttttctacttggagcttctgcctggatgatcctttatggctcttacgagataaaactataagtatatttaacatcatagcatacatagtgtgcactgaaggggtcccaaaaaattcctattcacaaagtcttttttagttttcttttgtgcatcatttgctcaaatctcaattgaatttgaggacttcattttcctttcttccctacagtaacaacacagtttaacacctgcttaattagagtctattacagtacccgggtaggcctgctgtcttctgactggggatttatagaaagtggataatacggctgaggtaaaatcaacgactacaggcctggcgaaatggctcatgcctgtaatccaactactttcaagggcagaagtgggagaattccttgacacaaggaatttgagatatgcttgggcaacatagtaagacccagtctttataaaaaaattacaaaaggatcctggctcggtggtttgcacctgtagactcagctatttgggagggtgagctgggagtatagattgagcctgggagagcaaggctactgtgagccatgattacgccactgcactccagcctaagagagagagcaagtcaaagtctgaaaaaacaacaatgaaaaccacccaaaaaacaaaaaagactagggccaccaaaaaggctttctttttcacttgacttcttgctccagggtttacctttttaaagtgcacctcccagtgtctagggagtctacagacttggagtctcttcctttcttgcctcggtatcacaagtggctccatcctatatccttcagcactccttccccatttcccacagagccaagtagaatagtgatttgaacacatataagcaattttaatccctaccctccttgatgctttacaaaattttgggatggatctgttaagcttttgtctcatttgagtcagggatatctcaggcccagctcaaatccttaaaggaactgagatcagagtagaggaatagaagtgataagggagatatgtataaagtgtcttcatgcaagtaaacaagacacatttaatttcaaattcaagcagtgcagacattgctcaaaaccaattgaataaacatttgaattttaggtctccccaaaggtctacaacagtgatggagtatctttaattcttctacctcttgttctctatggaaaaaagcaaatgtaaaggtgtcatttggtaagtttgtttcaattctaccatcagatactcagttttcaaccatttccctatcctactcattaatgaacagcataagggaaattttcatacattttggtcaacataccagctattggtgtgtcctttttacattaactgaagaataataaatagtctttacagatgttacgagattacaaaacaaaaagcatccaaaggatctaaattagggtgtaatgtggatgcctaatggttttctatcagaactctcaccaattgccctgtctgatgagagaaatgagcaggagctctgtcgtggtgaaggactctgctgaagctcccccaggcatttctctactagagttctggctttctcaaaatattctcagaataagcatatattgtccttctctggcccttcagaaagtcaataagcaaaatgccttgagcttcccaataaactcttacaattacctttgcactttcctcatccactcttctttgactggaccacttccacctcttggtagccattgctttgattgtgctttgtttcatgattgtactgataaagccatgttatatctgctgtcacaattctttgatgaaatgcttcaggatctttatccccttatttaaattttcagggaagcttcttctcttgtctgtagctgctctggttgccatagttttggcatccacagagtgaaaaatttgctcaacattaatttttcagttagaatcatgtaagatgaaccaattaaaaaacatgaagggttggctattgtttgtactcttaatcttcattcctcttctatcatggtatcaacaagatacatttgatatgaatactctgtcaccgtagacttgaggttcagcaccatttcatcccttcttgaaataacatatctacttgtgaactgctgatttcttcagccattatccayatgaacttttcagaaagcatcagtggtttyaccttctttcatgcaagcttaaccataaattttctctttgttttcactttaattttagaaaaatgtattttgctcttataggggatgttttgaaactcctgtcttatttttcattattccttgaaatagctcctattcagacatcttacagcatatcagtttaggttcattttgatgccaaaaaatgtggaatccttttatggtatttcttaatataacatacattttcatgaactttttaaagacctactacattacaggaaggcctttcaataatataagaattgctacaggtaacattgaattttctagttgattaggcagattaamtttctgtttttctgctgacataaatagtgatgtgggttgagaaggaatataataccagtggtcaaatattctgcagctatgtggaaagtcaaacagttgcaactaagtgtcacatgctttaagggagtcatagagtagctgcttgggcctagcaggtaccctgatgttaacaggatgattgtctctggtttcaccaaacattacttcaaaagagttactggacatgagcagttttgcctaggtagcttacagtagaccttcaagtaggtaaggaaggtcagagagaatgagcagaggtgaatgccagtcagatgtgcctctttgagtgggtagctgaggaagttccagtcctggtgggaggcaggcttctccttgtctcctgagtccaggaagagaacaggtgatgcttccatatatcactcaactcacaccctattcctgaccctctctaatgtcagaaatgagtgagagagatttgtgtttcaggcaagaataaatattgggtatcaacctaccagacaaccaaaacagagattaccaaagagctgaaggagacactgtgactgacttagaatggagtcaaagccaggagcaggactgcagcaggcgcttaggcatctgtacaggagtcaaggacctcagcaatccacctgtcatttaaaatgaatgtaaacataccgtgtaccaagtagaatcttgatttccaccttctataacctgttctctttaatatcaacaatcattaatttcagaccaagaaaccagaatatattgagaaacacatcaatgaaacaatacatttcccagaactaaaggttaattctccatatcgaaagggcccaatgattatccaaaagcccaaatttaacattttcagggctcagtgcaagaagacaattagtggctaacatactccaactcttaataatcacacattataaagcaagctagactctaggtttagatcacatttccatgtaagtccttcagcctgttgcttggagattgctcatataagctggcatagagactaaaggtgtctgtgtttccctgtaacaatcctgaccccgcaatctgagaggtgggaggaggggggcacagggctgtctgctagagaagcacactagacgttgggctggagcccaggactgatctgcccaagcttcgagagcccctgccaggcatgttatgctcccctatgcctcacttctgagtttggactagtggcaatgtctacacagctcccaatgataaccctactgagcataggactggcagagaataataaccagaatatacaaacaaacaactcaaaaacaacaaaatagtccattaaaaagtgaacaagagatagaaatggacatcttttcaaataagacatacaaataatcaacagtatgtgaaaaatactctatatcactaatcatcagagaaataaaaatcaaaaccacactatcaccttaccctattcagaatggctatgattaaaacaaacaaacaaacaaaacagatgttgggatggatgtggagaaaggagagctcttatacaccctgattggaaagtaaatagtataaactctatggaaaacagtaygatttctcaaagaactaaaactcgattactattcaatctagcaatcttactactgtatctatgcagaggaaatgaaatcagtatatgaaaaataaatctgcacttctatgtttattgaaacaccatacacaayagcaaagatatggcatcaacctaagtaaccatcaatggatactaatgggtttgtaggtaaagaaatcgtgatatatacacaatgcaatactactctgcaaaaaaaaaaaaaaaaaaaaaaaagaaggaacgaaatcactccttttgtagcaatacgaatggaactggatgtgacagataatatgctatgtgacaaaggccagatacagaaagtcaagtataacatgttgtcactaataagtaggtgctaaaatgtgtttacatagatatagaggggagaactatagacactgaagccttggaagagtgagtgggtgggagggaattaagagttagacattaattagtaaatgcaatrtttgttattcttgttatggaaaccctaaggccatgatttaaccattatgcaatgtatacatgtaacaaaattatctttgaaccacatatatttataaaaataaagtttaaaaataaattgagggtgaccgggtgcggtggctcacgcctgtaatcacagcactttgggatgccgaggcggatggaacacgaggtcaggagttcgataccagcctgaccaacatggtgaaaccccgtcttaactaaaaatacaaaaattagccaggcatggtggtgcatgcttgtaatcccagctactcaggaggctgaggcaggagaatcgcttgaacctgggaggcggaggttgcagtgagccgatatcttgccactgcagrccagcctgggtgacagaatgagactccatctcaaaataaataaataaataaataaataaataaataaataaatataattgaaggcaaatttaagcatattttttcaaaaaagaaaaagagggagatggagtaggagaaataaaaaagaaggaagaggaggaggaggaggaagaaagagcctgcatttctaattgtcataattaaatttccataagcagatactattttttttaaaaaaaacctaattagaattttacgggtctgataagaaagaaaatgctaaaaaaaatatgratactcartgtgttcctattttgtttgaaagcctagaaaaaaacaatatcagagactattctacttagattttttggacaaagaaatcttaagatttttaactcgggaacatttaattcctcacaatttcatgtctgctgttctttcctaaaatcattattgtgaagcagacatgactatatccactagtgtttcatgtatgtgatctgcttagtcttcatcctttaggggagccattttgattattcaaaaatttagaagaggaaacttaggctctgagacttaagtagcttcctatgagtccagagttagcaagacatagttcttaaactgcaatctgagagattccaaattctttgcccattcaagtcaggctgcctctgatgaaatccatttaggttttcttaagaatagtaagactcataggcagggacagaactgatcagtgataaaatatgggaaaataggtctagtggcttctggggaatagaggcatagaaccatactcatttccctagaaaacaaaatcggttacttttgaacttgttaaaatttctctcagcttctgggattttctttcattggtattgttttgcttacattcataagctgactagaatatcaagaaatgacctgaaaataattgtacaacttaaattcgagctatagaagacagagaaggaaagaaacagtggaactccttccccaggtggatgacttaataaggataaggaggagagaagcttgctggaaacatcaaggagaaggggtcctggatattcttacaatgtgaacatgggtctcagattctagagtcccaaacactcagaaagagacaccaccagcagaaattgcaagctgattgttttattggtataytgaagttagagcatgatgccatgtttcacggcatttgaaacactgttatcttcttattcacttcctgaaaaagacaagcaaacaaggaagattacagacaacacttgacatggcaggaaatgtctaatccctcactgggggttactgcagtgatggagatgcaagcccctactcttgccctctatcccttctacagcccccttctccttagtaatattttctttgttcactctttaagccattgcacataatgtgatttaaagtgttgcttagatgagaaagagaaacaattattgttatgtgttcatgctttgctgctgttggttatgtaagggctatttttacaaagatgggcactgcaacatatcatataatagtgagaatgtgaatccmgccttaatatccagtgacagggattggttaaatagattacggaacaaccaaacaatagaatagtatacaattgtaaaaacaaactaaccartaaacactgaagagatctaaatgaactcakgagaaagttttctaaacaataaatttttccagtgagtaagacacaaatctgaatatacagtatggtataagtgcttgtaataaaagcattatatatatttatgtagcaatatatatttcaaaaagtagattccaaagagtaaaaggtgggggttttgagaaggatagaagggaggaaagatgagttaggctcttactatttagctctgtacatttcggttcagtgagattagtttttgttagcttaagcatgtatgactttaaatgtaagtatactaaaaatgagataccattttacaactgaaagttcaaggaccacttagcaggaatactggacctgaaagcctgatgtgaggcaggactgagcaaagcatgttcaggtgaaaactttaaatgggagtctgagtttgaggaaagaaaatagagagagccaaagggggaacatggttctatgtcctcattgtcaaccctacttaagacatgtaatttgaagayagtgattctcaaaatcagaattgccttcaagagcttctgtaaaacacagggtcacagggtcttgatactctatacaagaatatctgaataacaatttttagaaatgtgttccaggacagggcaatattaacaggttttcagaggattcattggcacaatgaagttggagaactgtagcagttggagcctttgatggataataaactggaatcgtacctgtcattgaatcctagattactgaggagactgcccctgtggaggtccttgtgggcggcccccttggggaggtggtccctggggctttccaggaggaggtgggggaggaccttgctgatggcctccctgttggggtggtccttgtggccttcctcgaggaggacggggatggcctccctgttggggtggtccttgtggccttccttgaggaggagggggatggcctccctgytggggtggtccttgtggctttccctgaggaggtggtggaccttgttgctgctggcctccttgttggggtggtccttgtggctttccctgaggaggtggtggaccttgttgctgctggcctccttgttggggtggtccctgctgagggccatcatcctggttcccatcaccagcagagggttgagattgctgtcctcccaaaggtggtccctgacgctcctcatctaggaactgctcagagtctcctccatctgtgtgagttgaaacaagaagagctgagctcatgctggaaaaccctcctgtcttcatacctctctgtcttcaccacacggccggcccctctctgcctgacctgcctctcaactcccaacctccccccttcccaaggcttcctaattagaactcctcttaatccacataagggtgatgaaaaattgaatttctttactcatggtccccagaatcaaggttgggagaaaactgtttgtatctttggggcattggtattagccaattcctgacaagaaaatggtgataagaagacactggagaactcatcaatttttcagggaaaaatggagacagagtttactgagaatttattgggatttacctgatattacgaggggaacatcttcctggctgacatctagaaaagaagtacaggatgatgggaaaagttacttcctgaatcattcaaggctcatagtgttctacgaggataaaggacctctgatcacaccctgtgcatcccctttgtgatctcatcagccactctctgatgctactggaagtggaagaagatgtaagggaaagcagtattgttactacactgagcgtcaaccaggaactcaacatagaagggcccctgtttgtcctcttttgattccccaagccttgatgaggaatgaagatacaataggtcttctgatcctcggcatgaaaattctgcagtcccatctgttttctcatcctcctctcttccctccactttcctcctctatagcatttgcctgtaaacccttagcgcttatttagttaaactgctctgagtatttcaatgacatatttggggattcttctgccctctttcatctgtaaatatgttgtttatgtttgcaagccttctcaacaggagccaccagacatagccacttggatataatcttacgcatgccattcccagcacattgaaatactacattcaggagacagaaaaatgacaatgtttcactctggttattctctaactctatgtagacagagacaagtgtttacccaattctctgcctcggcagtagctctgacatgtgtttatctccttcattaatgctcatccactgtacagcaaggccaccatcatccctgtctactgggatcagtacaggatcttcacagctgtacttccctgaatctgtcttgcattctccacatccttcacagcagtcccatgtctctatataatgcaaatctcactctctcacacccctagtacgaattctttattggattctatttgtgcaacaaataaactatgaggccttgatgaggaatggaggtacaatagatcttctgatcctcagcatgagaactctgcagtcccatctgttttctcatcctcctctcttccctccactttcctcctctatagcatttgcctgtaaaccccaatcagagtcacaatatcttcccccaattcatcttaccttcatttaaatcctgagctgagctgaaggccagcagggccactgacagcagaatcagaagcatcttgcaggaggctctggtgtcactcccaactttgtgctgggagaaacgtgtcagctccctttataaagacaagcaggacaatggtgcatttgagctccctaccaggtgggcctcctcgcctcagagactggcttctgctttgcttacttcaggtcaagtgtatccctcatttcttttgggactctagctcagcaggaagggttgggtaggatattgtttgtgtctaattcctaaaaggcacaactatgacttggacaaatgttttgacggaactgtgtccaagcagtcggcacagtgtcaggattgaactttagacatcttttggttttcaatctgtttggaaagactgctattctgcttttcactgtgcttttcatttstgtgtatgtgagtttgtgtgggtgtgtcggggggtggacactgatcctacagctaacagtgaagatggtcaatatctctgactgttttgatagcctctttccatctctcatgatgtgtgtgcgtggatattttcacatttagctaaatttttcatgtaacagagatggtcttgcttatctgtgagatgtgtgaggacagcacactcccaggcacacatatatgaragaaaggkgctggcagcctgctcaggctacaagaattgtccaaacttctgtgaatctcactacactcaggcaagccttggtgctatacaacacaggcaagctaaaatatttgtattttaaaaatatctttagggtttattaaagcaaaactgaactcagaaaccaccaaggaatttctagacctgaacaaactgaatatatggttccctaagtgagccacacgatgtcatatagctaagacctccactttctccagaatattccatagaattcatcctctactttatttcttctaataaatattgtaattgtcatcactgataattaaatggccacaattatacattcatctaagataatttgtaatacctgtccaagcctcaattgccttgattggtcttctgcttttactcagtaattatgtcacctgtttcatcagagtgttctttctcaccaaggatttttatctgtaatattccaatactcattctttctcattctttttctcgcacttatttgttgaaattttgtattctgagtctaccttgccatgtttacttttcgtcctatatctttttttttctccctacaaaggtgtcctttatttatccttctaagtaaaggtgtgtggtactcctcactacctttactttcatttttgtctgtataatttgacaataaaaaattaagtttccaaaaagccctgtcagggtcctggtttggtagctctctcctcagctgctgattgctccaaaaattaagtttccaaaaagccctgtcagagtcctggttttgtcgctctctcctcagctgctgattgctctgtgatacctagaaattccctgytcatcaattcataaaatatactactcagaatcaccagctgcactttccatttcagaccttgagtaggtcttgtgtaatttttcactttttgtgcatggttagtctttatttgaggatagcttggttggaggcatggctgagaagccaggtgacagaaaatcataaagacaaggccctagacaggtgtgcatgagtggatcctgtgctgggcatatgagggtctggtatggctcttctgaaaagttgcagataataatacaagaaggcttcctagtagattagattttgctacagacgacattgttcttgtaagggacccaggcagattggtattttccctggaataaatatagacctatttcaggggggaatgcattcttaattggcaattcttctctggccctgtgggaagtagatcagctctagctgggccgtatgagttgtatctcaggcacagagtagttgcttgagcccagcagctcccaatgcgttatggagattattgtctctggtttcaccaggtactgtttcccataggacctggagatgagcagtcctgcctcggtgacttcaggtcaaccatcatgtcaaaaaggaaggtcagagaaaaggaacaaagaggagtgccaggcagatattgcctgatgatgtgggggactgaggaagctgcaggcctggtgcaagacaggtttctccttggcagcagagtacaggaaaagaacaggaaatcctcctaaaggtcactcagctcaggcctgctccctaacctgctccaatgtcagcaatcagcgagagactagtgtatcaggaaagcataaatatcagctatgctctcactagacacatcaaaaacagaggtaatggaagagctgaaagggacactgtctgtgagtgarggtgggtgaaagggagacgcaggactgctgcaggagcttgggtacctagaggtgggtggcagccctcagcaccacacttgccttctactatagatgttcatattctgaggccctgaagggccagtcttcaacatatgaaattttaggattcatctctcataacacatcccaacattttctcggtcactgacaggtgtttacctagtggttcaaaaatcctcgctccctccaggaacttatgcattagccgatctaattgcctccactttcaaaatacgtcccaaatatgaccacttgcctgatctttactagaaggtgattgttcagccatgatgctctctcctggaggactttaccagcctccagctggtcttggtaatgttcttcccccagctcatcccatatcagttccctcacaacaatcagagtgatcatttaaaagtagaaattaggttatatcacatttgtgcttcaaatctcctgttttttcttctgcacttgtgataagatccaaatttcatgcctcagctctttcacacccacatgcctcactcttttttgaaaaccaggaagctctctgaatggaacagaaagtagaatcttcttcgacttcaccatgctctagtttgcctggaacactaaagatggtttgccaggaaagatgaacattgrcagagggaataaacttctctgagagtcagtgagtttcattgggtcgctgtggtctggcagtgttatgaattggcagaattattctattaattgcaccaactaagcattctgataatacagttagcaaataaacacaatagtctctgagacttcaacttgctttgacttgtctaaaaagtttggtgacactattatggccaattaactattaaaaatatcttctatatttttaaatttgatgttagtggtccataaatatatatatttcacaattaatttagcatatttcttttttttttttttgagatggtgtcttgctctgtcacccaggttggggtgcagtggcatgatctcagctcactgcaacttccacctcccgggttcaagcaattctcctgcctcagcctcccaagtagctgggattacaggyccctcgccaccatgactgactaattttttcccatctctactaaaaatacaaaaaaaaaattatayctaaagaaattaagtcacatggctarggtcactgtagtaaatgaggaaaaattaagttgattttctcttctctttgtaattccagtttaaccggatgttgtcgatgttgttttcaatttagaaaatatagcaaattgttcattagccatgagtatcactctgctatccaccactttctaagaaggcgcttattttagaacaaggctaacactaaattacaggaaattaagtaattgtggcaaactagagaagcatagtatgtataataggtcttactcagttagatccacctgtcaaggctgagtccctttctggagtctctagagaagcacccattttttgtccacattccttggccttcttccatcttcaatgccagcaatagccacttgagcctcccatcacatagcatcacgtcgcccttgcactgactcttctgcctccctcttctgcagttaatgaccttatggttacattgagtccacctagataatccaggataacctttctaaattcaggtcaattgattcgcaaatgtaatttccctttgtcatgtaagttaatatattcacttgtctgagaattaggaagtgtgtgactttgggagactgttaatcttcatagaacacacaggatggacaccttacccatctagacctggtttggctcagtgagagttggagagactcacccaggcttcttccagatatttgcatgagaatatgaatgagtttatgtataattagttgttatacaaatatttgtgacttaaagtatatatctatgcaaaagcgtaaatcacaaactgagatggcaaaaatttactttcaataaccattgacacttaatgcattttttgatattttagagctgtcatattttttgttttttatttatactacttttgattgttttctttttcctgatctcctatggggccactgaaagtgttttataattctattttagttgatccgtataatttttgagtgtatctctctgaacagtgtttttagtgattcttctatgttttactttacatgtacatagcttataatctagtggtgtacactttttaccagttttagtgaagtatggaaaccttacatccctttataatttttaggtcaaaatgaatttattatttttcagttttgtaggtcagaaatctgaactgaggttcactgagttaaatccatgtgtcaaggctgagtttcctcctagaggctctagagaagaatgtcatttttccacatttcctgtctctcttccatcttcaatgctagcaatggctggttaaaacatatgaagaaaactcaagtgaaaaaggaagatatattgtgtttgcccactttccccctttctsttatttttacttcattcttgatgttccacaaatttctcttctattctttcctttatgtttagagaacttcatttggctattatttaaagataggtttgttggaaagaaattctcctaggtttctagcttttctttttttcttagaatgcctggatttcctttacattaatgaaggatatttttattgaacataaacatctggtagaccatttctacttttgagcactttaaatatttgtgctcctttctactgttatttctggtttctggtsataataaccactattatttatattgcattttccctataactatgatgtcatttccttctttctgctttcaatattttgtctttaattttcagaaattggacaatgaattttcctggaatggatttcattggttgtattctggttgggatttgctcagcttcttgaatcygtaggtttatgctctttgctgtgtttggaaaatttttgatcattatttctctgagtcctttttcaacatcaacctcttctgcttttctgaaactcagaatgcatgaatagtacaycatttgttatagcctttcatattcatgatatgatgtataattttttcaattattttaccctgtattgtttagagtatataatttctattgatccaacctcaagaacactgtctttcctccatcattttctttatgctatttatcatgcccaataaaggttttttaagacattatatttttcatttctaaaatatctgttttcttaatttataatttataattcctatttttctgctgacaagtttttcctttccattcattttgagtgtctaccttgacctcatgaaggatgggtacaacagctcctgtaaagtctttggtcattttaatatctaagtaatttcaaggttgtaatttcttgattgtttcattccttgagaaatggtcgattttttgtgagttgttttgagtacattgagtaattttctgttttatcttgcacagagggattttctctttttgcaatacacaaaaagcccaataagggtaggttcggacattggagggtgaaggcactcatggtaaattatgctccaccaactggctcaaatggccagggagtttgtcccactaacatttttggtggttttccctgggtcaatctctctggcacttatgagataatattttaagtatttaatatcacaccatacatacagatataaagacaataaaaagcagtgcatcgaatgggtccaaagggccctatccacaaagtcttcctaactttggtgtgtgtgtgtgtgtgtttgtgtgtgtgtgtgtgcactgtttgttcaatcctcatcagttgaactcaggcacttctttttcctttttctttctaaacctgcttgttagaggctgtcacagtagccagaaggccctgctatcttctatttgagtatttatagaatgcaggaaaaaagagggtaaactataaagaacgactgtaggcctccccggtgcagtggctcatgcctgtaatatcagtacttggagaggcagaggtgggaggactgcttaaggccaggagttctagaccagcctgggtgacatagtgagactcctctgtctttacaaaacactaaaaaattatccaggcatgatggtgtgtgcctgttgtcctagtcatttgggtggctgaggtgggaggaaaagaagggaaggaaagaggaggggatgggaggggaggggagggttggctttttttttttcctcttggcttcttgcccttctttctagtgcacctcccagtagggtctcttttgtatttcctcacatgctattgtcctccatccctcagcaccccttcccccaacccccagaaccaagtagaatggtgatttgtgcacatatatccaacagggctatactaatttgagtccctactctccttgaagctttgcaatatgttgggatggttctgtagggtctttggtgtcccttgggtcaggaagatctcaggcccagcccgaatccctaaagcaattgacatcagaatagaggtaaagaagttatcagggaaatatagagaaagtgtcttcaggccagtatgcaagacacatttactttcaaataagcattattgccactactcggtggttaactgaataagcatctgaatgtaacaactttgggagatccttaatcttttcacctttccaccaaaggcctgtaacaactttgggagatctttaatctgtctacctaatgttatctggagaagacagctaaatctaaaagtgtcatttggaagtctgtttcagttctaccagtggtactcaattttcaaccacttcccaatcctcctcattaatgagcaacataatagaagaatatttatttaccaattacaaacattttagtcaacatgttagctaccagttcccatggactttcagcaaatcctattaatcagcttgtaggatccttcactttctcctcagaaggccaggtctttgggctgtgttccatcctcgttgccaaaattattataagctaacaacttagcttgtcacttgttgtacttgcagaaggcaaaagatggtttattattcactgaagtactagcagtagtcagaggaatatcatcgtactatttcttcaagcttcartcccctcacagggataagatgagaaactgatgttacatgtgcaagtagtggtgtctatcaaaagagaaatctcaaaattaggaaactccagtcttaaaaactttgatcactgtgagtaacctgtccatcttgccttctgaagaagaagctttacactggaatgtaagcaaatatctctggagagaagaagaagaagagaagagtctttatctttaaacaaatctgccttytgaccaagagggataccctatttctaaatcccaaggctctttgccatgacctggtcttgggcaaagtgaacgagactcctagggcacaaaacgtaaaaaggcattcaataggttgcagggccctaaaaccaagtggctcctcaaactttgcaccctgcatgccttgctcacctgatcctagttgaggcccttctgtttgctcatcaaacatactgtttgctcacaagataagagctagaccatgcagaagtgcaatacattcatggagaatttttttcccaacatccatycccaagatcaaggttacacagttgccaaagattgtagagtattctgaatatatcatctattttcttcctggacagaactaaatccatcagaagtaacttttttaaaaaatgtttctttcttttgcatacaatttgtttttattttagattaagagatgagtccagaggtaagggggacaggagaactgtgacatcagggatgacactaccctttgagagcactggagcagttagaaaggattgaaagtgaataatcttatttcataaggggtatgtcattttatgattcaaattaagtctgtgattatcacttagcaaaattgctaaaatcattatcagaatatcccatatcatgataggaggaagaaaaagaagtaaaatctaaaattgttatggaggtaaatagaagactgccataaacaagctatctacagaattatggggcttaggaattcacagtaccctataaacaagaacacagctttgagaatttctatactctaatttttaaaaatgaagtatattttgtgaatttttcacccacaaattattttaactggaagccatcacagctcattaatcagcaattggtgaaggactaaagcagcccaaatcattcctgtctcaaagtaaggcctgcttgtaagcaagtgtgaactggggatgtatgtgcagaaatcagagcctaagtatggtaagctggacatttcagagataaggaaggcagctggtgtgtgtgaaatcttatatcaataactgattttattttttcagtcctaattgctattatggaatttgtgcttttcattattacatcttcacaaagcatgatttttaactttagaacaatttacattttatgctggataattctgttgtgagggactgtcatgtgcattgtgagatattgagcagcatccttgtcctcgtacagttatcaggtaaaatacagagtgtgtcagttcaatttgaatttcaaataagcaacaaataattgtcattgtctgtgtatccaattatcaatgctgcaggtctgtaattggtcctccatagcacacttacattatgatgtaaactcatattatggttatcacaagtaatacttatttataaatttattcttgttgttttttcttttgtctgaaatgtaaatttaactaggcctcctatatttttatttgcttaatctgttaacattacaatagatgccagcagcatccgtccaattttaactgaaatgtctccaggcattattaaatgtcccctaggggggcaaaattgccctgtgtggagaaccactgtcctaaagggatttcatcctttgcacatggaaatctcgtggtctattctctggatattttaattttattcacacatttaaaatttcgttttaggcctgcaatgtccaggttatttttctagggtttactttttgttctatcgattaccatataattaactttttaaaatactttctgcaatgttgaaaatttgtcttttgtctttactgctgaaaattatattatttgcttgcaatatgttcttttttttcttagagagaacgtaattgttcttcaaaatctgcttccaattatttcattttaaatatttattaytgttaccttaaacttgcgattgtgttcttttatttaacctgctatttttacatgctttctcattacatttttaagaggagacgttcttattaaattcaattctgtaaactgattggttatccctgatttgtttttcttttcaaaactttatttatttttctttctttacacagtgactttcatcaaatgagatcctgtatttgttactatcgtcttggtcttctatatttttatttactaaacctggtaactctacactagatgccagcagcagtcctccaattttgcttacttaaaatcttactgattttttaatacgtgtccttgccttccttacacagttaaccaattgagtaaaattttattgttagtccaaagattcagattctacagtacaagtctgttgtagatggtcaagattgtaacatttttgatggtcaaagttgcttagtgtttttaactgaaaatgactgaaaatattaacagaatagggcttatatttggaaataactcttagtgatgtacatttcaattgactttgtttcatatcctcaaagttttcactaagctgtagactctactaactattttcatttgagttttcctttctagttttaaattatcaattgatcatcatttttaggataggaactaaatccctatgtgtttgtacatataaatctgattttatatacactctatacacatacatagatattataattcttgatgtatttctattctattctaatgcttatgcaacatattaataaaatttaaagatagagtaatctattatattgatcacagtgcctaatgaaaaatgcattttcaatatattagaattttactattaaatacataatctccatatatggtgcaaacaaggtagcaatctgttctgcttaatttaaatcagcaagtattttcaataatgctcaatatatcatagaacataatgagaaaataagaggtaggtgaaagaaacaaatgtgtagccctcctgttcttcttcctttttttctttctgagaatatcatcactcatatcaggcatgtttataaaaatgagagattatgtcctttttggcatacttcatcttcttcaggacacagagagaagcttgcttcagtttgctgtcccgtaaaattagaagaaatgaatggccagatggatggaaaaataccagcacactactaaaagtccttgccgcaacgaagtctagaagaggacaggccaatgttagtatgatactgatgaaataatgcacaataaagaggagtagaaatgaaattatagcttttataggttttacatgggcttctgtgctgggatccctggaataaataccatgtagcttcatctgcctggtgtggctccataaggagaggattaagagaagaatggaagccagtgtttccacaaaaggaaggatgaacatcatctgaaggagaaacagagaagtgaaatcatgcatggtatccatataattaaatgtcaagttgccttttattgttacccgttcttagattaaactattaattattatttccttcagaatggaagttgtgcagaaagagatcgttgcctctagtacaataaagagaagcaccttgtgaattttccatttcatccagaggaaaatgggattggagaagttggctaccttgaggaaatagaagacactgaggcaagtggtacaggacaggcagaaatagctggatcctgtccagagaatgtcaaaacttactgcaagattcttagaatcaggcattttctcatagcctatattgaaagaggtagctaaaattgttatctacaggaaacatatcctggagatggccaagcagttgagaataaaatcaatcagggagacctttcagttcctgattcagtcaatgatattaaccaatacaatgaatcaatttcccacagtccccattatgaattacactacaagaattcttataaacagtgtctcccaaatgcttgacatgcctctacatagtgaatctctgccttcaatacaccattggctgattgatcctagctgcactgttatagatttatatatccaaaggagtgacttctttctgttttattgatggccattggtgtagtctggagagatccaaggtgtgttctaaaattagatttcaactaaattgtaaaatatacaagtttttttcccttgagggtatcagctagtgattttcaaggcaaatattatattccctgctactattgactctggttgtattttacatggaaagttctgcattcaaatttgaaccctcatttgttaacatgcaaaattgaagtagattctcctttatagttttacaatgccatcttttgcttaaaggttattcatttgtatgatgtatccctttgattcatctaccaccctgggctagaaattctaagcccccatatagaaaaatgcagtatatatttagagtttatgatcagcatatttcttcattatcaacctcactaatgcagattatttataaaatatgcaaagtttaagaaaatggagaaaactgctctctgatataataccaaatcttttagagagtatggaagtttttggccaggcacggtggctcacgcctgtaatcccagcactttggaaggccaaggcaggtggatcacctgaggtcaggagttcgagaccagcctggccaacatggtgaaaccctgtctctactaaaaatacaaaaattagctgggcttggtggcatgctcctgtaatcccagttactcgggaggctgaggcaggagaatcgcttgaacccaggaggcagatgttgcagtgagccgagatcacactactgcactccagcctgggtgacagagtgagatccgtctcaaaaaaaaaaaaaaaagagagagagagtatgcaagttttaaaacatacgatacatactttggcacttcttctattgatatcttaggagtctgtgtactctgtccttaaatctagaatggtttgtgactaattcaactaataaaaatgctataataattctaaagctaaatcatgaaaagccatgcagttttttcttaatcactgcaatatttactcttggagtcctaagccacatgtaagtagtccaactactctgaggtcacaatgtccaaacccacatgcagaggccatgtgcaggccctctggctcattatcccacgtgagcccagcttttacgtccttttaccccaggtactaaacctatgagccaagaaagcgatatttgacctgtctgatacggtagatactagccacatgtcacacgtggctttttaaattcacattaataaaaattaaataagattaaaagtacagagcctcagtattactaaccatatttcaaatgctcactagccacgtgtgactattttatagccaacatacataggggatatttctatcattgcctatcattgacatttctatgtatttctcagctccgccttagataagttcagcccctggtcacttgaattgcccccagttgttcataactttctggctaaaggcttagacattctggaacaaaaagaagccatccctgctatgtcttgaacaaaaccctaacctacagaatctttaagtgaattagtctattcttgcattgctataaagaaacacctgaaactgggtttctgtaagaggtttaattggctcatggcttcacaggctgtacaggaagcatggcggcatctgtttctggggaggcctcaggaaatgtataaagatggcggaaggcaatggggaaatcagatacatcttcacatggttggagcaggaggaagagaaagatgggggaggtgccttacactttcaaacaaccaaatcttgtgataactcactcactcactattgccacaccaccaccaagggggaaactgccccccataatccaatcacctcccaccaggccccacctccaacattaggggttacaattcaatatgagatttgggcgaggacagaaattcaaaccatatcaacaagcacaataaaatggctgttattttacaccatgaagtttctgggtgattttattatgcagcaatagagcatcagaatagaattatttagcatatgaatggtatcaatattttgtcatttctaatttccatgtctgtttttctcttctatcccaaataaaggtatccatagcatctttattttcctcagtgtaaggggaacttgtataaattttctataattttttcatacgttgagctgaacttaatcttaattctgatgaggtcaaaccaggaaaggccaattagtcatgttctttgtgtaatgcaactgctgcatttccctcccaaagtagctagtccaaaatttagtgacattcaaaaccaatggagatataatataggcctaagaggagtcaaagaaatgaatgagttggacagcccaccaaaagatacaccctaggtaaattcacaaagaaaactccatgactaaaagaaaggctaattgtgataggcaaacatgaaatgcaaacaaaactgaaactgaaataaacaaagggaaattcaggaaaatattatatgctgaaaaagggttattttatttgtcttattgaatatcttctttgttccagccctctaggaggtgggatgaagcattaaatacaactatttttaaatgcccttaataagttgacattctgaaaagatgaactctaaacatataactaataaaatatatatcatacagatataaaatatagtttataagaagttgcaaatataagtagagagggtcaatagaaagcatgtcagaagaggggttgaaattttaaataaggtgcttagggaaggactcattgagaaggtgatgtctgaacaaagacctaaagtaggtaaagaaattatccatgttttgtctgggtaaagtacattccagacacacggaacagcattatcagtgtgctaacattggatgtacctagtgtgtctgaggaagaacaaggaaagcagtgtgactgttgcggagatgagagagtgagaccactaagagtgaagtctcagaaagaagaggcatgtgcccagaaggcagcacatacagtcaaaagagattattttagaacgttaatatttaacgcctgccctgctgtgttttgtacttgcgtggtgcctactgctcctctcttgtggctgatttctcccttttggaatgagaatgtctatccaatgcctgtacaacaactgtatcttggaaggaaataaattgttttttatttcacaggctcatagctggaaggaacttgacttccagtctcaaatgagactttggacttcagacatttgaattgatgcagcaacgtgttaagaattgggggactattgttgggatggaaagattacatttttttttatgtgagaaggacacgagttttcaggggaccaagtcagaatgctatggtttgtacacggtttgtttgtccccatcagaactcatattgggatttgatccccaaagtagtggtgttgggaggttgagcttagtgagaagtgtttgagtcatagggttggttccctcatgaatgccttggtaccattttcaatgtagtgagtgagttctcactctcacaagactgaatttgttctaggggaatgagttgtttttcatgagagtgaattgttataaagccaggatgcccctttggtttattctctcttcacatgtgcccgcttctgctttgaccttctccaccatggtttgacccagcacaaaagctctcagcagaaactaagcagatgctaatgccatgcttcttgtacagcctgcggaaccatgaactaaataaacctcttttatttataaattactcagcttcaggtattcctttataccaacacaaacagaccaagaaattgaggaataatatttataaaattatttcagtgaattaaattagataaaatggacaaattccctgaaagaaattactgaatcaggcacacaaagaaatagaaaatcttagtgtctatttttaaaaattgaattcttaatttaaaactttcacacaaagcaagggatgacctgaatgtttattttcatcacatatttaagaagaaaaaaataccaacctacataaatttttcaacaaagtctcataaaggttaactctgtgagctttatttcaagaaggaaagtgggaatctaccagaatcataaggacacacagatcccagggaggggaacatgggcaaacagcccccatgatggcacccagttaaaaaagtgaatgaagctccagtaggtgagagaggcagagagcctccctctgtgactcacctttccactggggatctgagcaacccagtgctcagagggaagagtaccttgtttctccaaagccctggagataacttggagaaaggcttagagacattgtaagggaaagacactgggaaaaggttcaggccttttctcagacccaggactgagagcaggataccatttttaattcagatgccacaaagtcaatcattctttggtaactaagcagcgtagctgtgcaggcattttagtcttgggccagatattggagcacctgctttagagcagggtggggacctccatggccagaattgtggggaaaaaaaaccttagcagcaaacactgaaactgtgctatcccccatcacaggcctggggcaggaggggagctgctacagccagtttatcctatgtgatgagacttgcaaccaggcagcttagctacttggaactagtctgtgtgtgtcattgctgggtaccccaccctgttcccctgtgattgtggtgcagcagactctcctccactctacctctaggcagaaatctgggcatttggatcactcattcacctggttcagcagcttcatctgctccacccttcttgtgcagagatcctagaatagggaggccctctctgcttcatgcctaggcagatcccaggattttggagcacctgctagcaaggttcagcaccctgaaccacctaaccttccttgacgtaggtcatggtgcaatggggccctctctgctccacagccaggcagaactctagatatctgaagcacccattcacctggctcagcagcctatcctcccctacccttcctgtgcagagattttgatgcagggaggtcctctctgctgcataccctagcattcaaagcacctgctcacacagactggcaacctgtgctgcctcacccttcccgttcacagatccatgtactgggctgatcctctctgttttatgcccaggcaaatatccaagcattaagagcacctgcctgcctagttaagaagcctgagtcaccccatttaccctgtgcagaaatcttggttggtgggggtgggttctgctccacaagcaggcagatttccaggtattcagagcccccactctcctggattaagagtttaggccaatctctccaatatccctgtgcaaagaacttggagccgagggggttacctagctccacccctagacagaactctggtcacttggtagccactcagtagattctccctcagtgttggtgcttgtgtctgccattggaagacctataggtggacctgccttgtctggccccacccaccttgctccccacaacccccaaggctgagcagggagttcacaccactgtgtactccatgagtcagaccattatctgcagcaacagagagtttcttccagtaaacaaggatcaaatatataaccatcacattgtccaaaactggctcttacctataagtgccatctactggcttgtaggttgaaccgcacagtctaatataaaacctgcaacctgtaagtgcataaggctatagaagctgggcaaaagacctacccagaattctctaaagtcatacctcctaaggagggagggggaatggaaagggaaagaaaaaagaacaataatattatagggaaataaagaaaaaaatcctaccttatggaaataattacaaaaattagaagtgccagtattgccagaggaggaggaaagagaacaagaattctaccaccataaaaaaagtgaatgtaatgaaatcaacaccatcaaaggagcacagtacctctccagcaatggtccctaaccaaaacaaaagctcagatatgacagataaaaaattcaaagtatagattgcaaggaagctcaatgagatgcaagacaaggctgaaaatgaatacagagagatttctaaagcaatccaggaaatgaaggaagacataaacatcttacaaagaaatcaatcagagcttctggaattgagaaacttacttaaggaattataaagtacaattgaattcatataaagtacaatctctcatagactggaccaagcagaagagtttcagaccttgaaaactggtcttttgaactaacccagaaaaaaaaattaaaaataatttaaaaatatgaatacagtcttagagcaatatgggattatgtgaagcaaccaaactcataaactgctggcattcctgagaaagaaggagaaatagttaataacctggaaaacatatttgaggaaataatttaagaaaatttccctaatcttgctagagaggtagacatacagatacaagaaatcaagaggacacctgactgatgctataggaaatgaacatcaccaaagcatatagtcgccagactatccaaggtctacactaaagaaaaaaatcttaaaggcagctagagaaaaagatcagatcacatacaaagggaaccccataaggccaagtatatagctcagcagaaaccttacaagccaggagagattggaggcctactttcagcattcttaaaggaaagaaaattttccaaccaataattgtatattccatcaaactaacctttataactgaaggagaaataaaatcttttatagacaagcaaagggtaaaggaatttattaccactggaccagtcttacaagagatccttaagggagttctaaacatgaaaatctgctaccaaaatagcacacctaagcacatagcccaagaccctataaagaaaccacacaatagaaactacaaagcacccagctaacaacttcaaaatagaatcaaaacctcacatagcaatattagccttgaatgtaaatggtctaaataccctcacttaaaagtcacagagtgacaaattcaataaaaaacaaaagtcatcggtctgctgtcttcaagagacccatctcacatgtaatgttactgttaggctcaaagtaaagggttgtagaaggatctgtaacacaaatagaaaagaaaaaaagaaagaatcactattcctatataagataaaacagattttaaaccaacaacagtaaaaaaatgacacagaaaggcactacataataataaagtgttcaattcaacaagaagacttaactgccccaaatatacatgcactcagcattggagcaccaagattcatgaaacaagtacctccaaacctataaaaagatttagatacccactcaataatattgggggacttcaacaccccactgagaagattggacagatcattgaggcagaaaactaacaaggaaattctggactcttgaaaaaacgctcaaataattaggcattgaaggaacatacctcaaaataataagagccatctatgacaaaactacagctaacattacactgaacatgcaaaaactgaaagcattccccttgagaactggaacaagaaaagggtccccactcccatcactcctattcaacatagtattgaaagtcctagccaggacaatcaggcaagaaaaaaaaaggcatccaaatagaaaaataaaagccatagtcaaactatatctctttgctgatgtgaatccatacatacaaaaccctaaagactctgccaaaaggctcctggcacagataaaggacttctgtaaagtttcaggatacaaatcaattcacaaaaatcagtagcatttctatacaataaaaatcttcaagctgagagccaaatcaagaatgcaatcccatttacaatagcctcaaaaaaaaaaaaaaaaaaaaaaacaactaggactacagctaaccaaggaggtgaaagagaactgtgaaacactgctgaaagaaatcatagatgacacaaacaaatggaaaagtattccatgctcatggataggaagaatgaatattgttaaaatggttgtacggcccaaagcaatttacagattcaactctattcctatcaagctaccaatgtcattttgcacagaactagaaaaaaaaaactattttaaaattcatataaaaccaaaaaaagagcccaaatagcaaaagcaaccctaagcaaaaagaaaaaagccagaggaatcacattacctgacttcaaactatactataaagctacagtaaccaaaacagcatggtaatattataaaaacagacacatagaccaatggaacagaatagagaacccagaaataaagacacacaactacagccatctgatgtttgacaaaactgacaaaaataaacaatggggaaaggactctgtattcagtaaatggtgctgggatatctggctagccataagcaaaataattaaactgaacctttacctttcaccatatacaaaaattaactcaggatgggtcaaaaatttaaatgtaagactttatactacaataatcctggaagaaaacttaggaaacaccattctaaacattggccttgggaaagaatttatgactaagtccccaaaagcaattgcaacaaaaaacaaaaattgacaagtgggacctaattaaactaaagaatttctgcacacattgtataaactatcaacagagtaaacagacaacctatagaatgtaagatttgcaaactatgcatgcaacaagggtctaatatcccaaatctataaggaatggaaacaattgaacaagcagaaaacaaataacccctttaaaaacgagcaaaagacatgaacaggcacttttcaaaagaagacatacgagcagccaacaaatattttaaaaggctcaacatcactaatcattagagacacgcaaatcaaaaccacaaagagataccatctcacaccagtcagaatagctactatcaaaaagttaaaaaaaaaaaaacagatgctagtgaagctgtggagcaatgggaacgcttgtaccctgttggtgggcatgcaaattacgtcagccactgtagaaagcagtttggagatttctcaaagaacttaaaataaactaccattcaacctagtcatcccattactcagtatggtgtatgcacgccacacttttttggtctaatccatttttttttttttgagacagagtttcactctgttgtcctctcactctgttcacaagaaaataaatcattctaccagaaagacacatgtactctcacaatttcattggaacactattcacaatagcaaaggcatgggaatcaacctacgtgcccatcaacaatggattacaggccaggcacagtggctcatgcctgtaatcccagcactttgggaggtcaaggtgggcagatacctgtggtcagcagttcaagaccagcctggccaacatggtgaaactctgtctctactaaaaatacaaaaattagccgggcgtcctggcacctgcctgtaatcccagctacttgggaggctgaggcagaagaatcgcttgaacctgggaggtggaggcagcagtgagctgagatcatgtcactgcacttcagcctgagaaacagagtaagattctgtctcaaagaaaaaaaaatggattagaccaaaaaagtgtggtatatatagaccatagaatactatgtagccattaaaaaaaaatgaaatcatgtcctttgcagcagcacggatgcagctaaaggccattgtcctgagtgaattaatgcagaaacagaaaaccaaatactgcatgtttcacttataaataggaactatacaattttaactaacactactaagtgatagaattgagaattgtacctctgactccagactcagtccttaactattatagtgttttttgtggggaccatatgagtgcagaggtgaaaatactgacagatattgaaagatgctattgggtaaataaactacaagagagttcagagaaattaatgataaaaatgatcatactactcctctcacttacctaacttttaagcaaacccatttgggaggtcctttctaaaaagaaaataaaagagagaaaatgagaatgctcaagtagatagtactattgaaacaggttactaaaaatgcatgtggtatcaccaaagaacctgttctgacagcagagaaaatgaaattaggctttctgtccttatactcaaggataactgtgccttattgcaaatatttattccaactgttccataaaatatctttgagttttgaaagcaaaaaaagttaaaaataattttcttacaggaaaatagttgattattgaacttcattaaaagtttttaatgtcctctctttgaaagacactgtaaagaaaatgaaatgacaagcctctggctggcagaaaatatttataaaacatatgtctgataaagaacttatattcagaatgatatggtctggctgtgtccccacccaaatctcatcttgaattgtagctcccataattcccatgtgttatgggagggactcagtgggagataattgaatgatgggggtggtttcccccatactgttctcatggtagtgaataagtctcatgaaacttgatgtttttataaggggtttcccctttcgcttggctgtcattctctcttcactgccaccatgtaagacgtgacttttgtctctgccattattgtgaggcctttccagccatgtggaactgtcagtcaattaaacctctttttctttataagttacccagtcttgagtatgtctttatcagcagcatgaaaatggactaatacagagactatataaagaacatttacaactcagtaataaaaacagaaagcaatgaatcaagctaagtagttggcaaaaggtttaaacaaacatttcataaaaagaggttgtatgaatgacccaaagcatatgaaaaaatcatcagcctcactagccattaggaaaatgtgaattaaaactatgatgagatgccattacattctgactagaatggccaaaatagaaaacaaaacagagtacctaccaactgttggccagaatgtgaaataactgaaacactcgtatattgctggcaatagtatgaaatggtgcaaccactctatagaactctggcagttttttcttaagttaaacatacacttatcatatgatttgacatttttactcataggtatttactcaagagtgaggaaattgtatatccagaagaagagaaatacatgaatgttgatatcagttttatttataatggccaataattgaaaaccatttgaatgttcattaacaggaaagagaaattttttaatgtggtatatccaacactactcaggaacactgctcaggaacaaactactgattaatacaacaaaacagaagaacttcaaaaacattatgctgagttaaagaagcctcacatataacaatacacactctataactgtatgtgtgtgtgtgtgtgtgtatatatggcatctatatatctatatctatagatatatagatgcataaaattctagaaatcaaaaactctcttattgttaccaaaagcagataagtagttgcttgggaaaaagggctggaggggagagggtaaactgcaaagggcactgacattgtggtcacacaagtgtatacattgtcaaaactctaactgaaatgtggactaacatgttgcattttattatatgtaaattatacctcaataatatttactttaaaaggcataatgtaaaatatgtatgtacacatacatacaatataattactaaaaaaccgttatctttttatgtggcagttactcatattaaactttttaaccctctcaattctctcaacacatcagtatagtaatagtggcaagtccaaacttccctaattctattccaaataactgttctaattatctgtagctcaccatttaaataggagtacttgagataataaaataattacctaaatcacccatctcaatgaatgatttagaattgaagagccattgccaaacaaaagattgtagatttacaattaacatctaagtatgctgtagtatatgtttttaatttacaatagaatctgccaataatttcctcaaataagtttcaaattcctaataatgtagaaatacatgtcataaatacataatattcttaggtaagatgctattatagagaagaatttaaaacatttacagtgaccttcacaataaaagaaaccaggggaagcataaaatatcttttaaactccttgtagactcctgtttctgtctgcaatattcaataatctgtggtctgaatggcttatgaaattgtgagtttctcatcgtttagcccataccttagctgccaccaaaagaaaggcctgtcttaacttagcgtttcctagaatcagaagaaaggagtggcttgaaggagagaagactccaatcgtctcacaaagcatgtagatcactgtgttctgatacagctcagaaatccatgatatgagaacacatagaaagaaactagcatagaataaaaggaatgagatcacaattttcaaggcatttgtatggaccttggtcctggggtctctgtgtcctttgtaattgagttgcattttctggagatgtttctgcagggagaaaattaacaggagaaaagagatgaaggccacagtaaatggtgttagactgaacatagtcatagtgaatttgaccgacactgaaaatgtttcaaagtcactcatactgaaattccaagttgtgtttctttcatatcggtccagccagtcttttatatgcatgtttatttgtatcagatttaaaaataagaagaccaaggttcctagcagtatcatcagaatcactttgtttactctccacttcaaatagagaaaagcagggctagagaaactcgctattttgagcaaataaaagatgctgaagattgtagcaagccagagattgaagtgattagaaactatccagctaaaaatcataattcttaatcctgttccagacacaaatatggctagataatgcagagctaaaaaccaacttactaatatttcccagatcagcccaattctggagattgccaagataatgaggagtttatcgactgaggacagctctcttttactgacccagtcaatgcagttgatcagtactataaatccattgctcaaattcccaattatgaattctgcaattattacaagagtgaagatactcggcagggcactttccatgtcagaacagagaaagttcaatgtctaatgtcactgctggttattcactgatctaaaatgctattcacatccttgagtgtccagtggagttcttcttccttctcctttttctgctccttctttcattgttggctcaacgtcaaagcagaaatctctaaagtttgctgatcgatcttcacataactgttctggtgatatctttatttttcttcaatttctctgctgagccctagctaagatatttatgtcttcaccatgggcagaaatatttcatagatgattatgcagcaaagttaaactcacatttgcaaccatgcaaataaagatatattctctttcattgttttgtacttttttgccttgtctgagcatagaaaattagattcaaccagcttgagttctgaggtacaaatattataaaaatctgattcatagaatatgtagctaaatgaagcttttatggctaatagcatagccaatgaagctttataaaatatgcaaagacttacctatgctatttcaaaagagtgctcaatttcttgtggagctaaagctggatctggtcaatactgtgactaaagagaaactcgtttacaaagcatccatctttctcattccctgcctcatcactacttagcagtgctcaccaccatccctccataggcaccaaatgccttcacattttatccgcttttcccctcatatttcttttttaaacttaaaagtgataaaaaaacaaattttacaaaatcagcaacagctaccaaagaaagcagtactatattacatcataacttgcaaaactgaaaaccaagcaaagaaatagatacactagttccccttatccatgaggcctatgtcccaagacccccagtggatgcctaaaacagcagatagtaccaaactctatatacaatatatttttttcctgtattcacctacctatgataaagtttaatttgtaaatcaagcacagtaaaagattacaaaaataactaataataaaatagaacaattaaaacaatatactataataaaagttgccaggggttgtggctcatccctgtaatcctagcaatttgggagattgaggcgggaggaccgctcgagcccaaaagtttgagaccggcctgggcaacatagggagaccctgtatctaaaataaataaaaattaaaaaaataaaaagtaaaaaaatgtgttaaaatatatagtgtggtgtctctcactctctcaagataccttactgtactgtacacacctatttttggactgtggttgaccttgggtcactgaaactgcagataagcggggactaatgtgttcattgtgaagagtcaaggttcctcaccccgccccactctttcaaaaactaccgaaaaaaagtggattaccaaaattctgaaaacgtggagactcaagaaagattgtctaattcaaaattaatataaataaaacactttatcttgattataagataataagtagccatttagctagatgaatacaaagctatttttatttaataaagatataatttgtgaattatgaatgtttgtattttattactcatgcaatctttattgggtgatctacagagtactaaaaaatttacaaaataattgcatcatctttaatgatttgcaagtttcaattataacttaaaataggtagatattttctattttgttgttataatggtatatttgtcaagatagaatagaaaatgtctcctttaacagtttgttaggtttgtatatttatgacctttaaatatgtagctatgtggcatgtggtcttccatttgcattcttgacccagggctgaagagatcttttatactttttcattttagggtgttcttcctacctatctagagaaaagggtttggggatgccggtcacaacttgataataccccaaatctgtacaaataggcctgaggaatggtactgtacttgctggtatatgaaaaaataccacagtttttagaacttgtgatataacacatgacaaagacatagagaatggataacaggcttgcggttctgagctgcattttcctggtgtgtttccataagagaaaacatttaaaaatataaatttaatcaaagagatgtagtctctcacttctataagagaaagagaatagatgctagggagcatcacagaaaaactttttcagcagtctgaactgaaaaggaaaatgaggcaaagggcaggaagaggaaacaatgaaaggtttgagtatgtaaagtattttttaagtcactgatggatgcagtttgccaacgttgtgttaggatatttgcagctatgtttttaaggaatattgacatttaattttcatttctcatattgtgcctatgagaatttggtattaagatttagctaacctcatatcatttgtttagaaatatttcttttctctttttcatttttgctgcctattattgttacatataacaaatatagaacatttaatgaagtttaaatgctatagtataaagtgcacactaatttaaaagcctcccatggcaagaaagagaactttgtaaaccccataacaccttatttgctcctttctaatcacaacccctatcttcattccagaagtaacaactatctgcaattcaaatcacgttattgtttaactttgtatattttaatttgaatatgtatccctaagcactagcttggttttgcctggttttggattgcacatgaatggaataatactgtacacaatatttttgaatttaactatttttgatcaatattatgtttctaaaattaatcatgttgcatatagagatagatcatttattcaattgctgtatagtattaatggaatgacaattcaaaatttatctagtctagtggaaacacaaagttggtttattttgagtttggagactatgatgatgatgatgctacgaacattctttaacatgtaacttattattgagtacatgagcatacatttctatgatcttgatctggaaccattccgttgcctatttcttctggtcttgttttggcagttacgactttctagatatttgtcagtttcaattatttatgttttcatgtaattttgattataatatcatcttattaaatttttaataccaacagaatatatcctttaaattcttcatattatttgcttttcttttcatgatttatcttaccagaagtttgcctattttgttagtctattcaagtctgtcttggtcgatcttttcagatgtattatttttcattaatttcatctcttatattgttatttaattatttttacttccgttgagtatgtttgctgttatattcctggcatacgttttcctcttagaatttttcagcatttctcacaaggttttactatattttattatacttaattttaaatattttctaaatttattgtgatttttcttccaccatagactatttttaaaatatatgttcgagtttccatttacataaaattttctctgctaaaatttatgttatgcatatatggtcaattttgataaatgttttgtgtttgctgaaaataatgtgtatcctgtagctttggggtgcagtgtttcatacatccactagatctatttgtaatcatgttatttaaatcctatttaccttttctgagttttgtctttttattctattatttcttgagatttaatgttaaactatcctgctatgagtataggtttatctatgtcttttagaagtcctgtcaacttttactttacatattttgatgccatgctgatgagtgcatagagcgttagaattgtagtatcttcatggcaaatataacctctactcacatgaggtgacattatctattctaatgtctttttccttaaaatctatttagcctcacgcctgaaatcccagcactttgggaggccgaggcgggtggatcatgaggtcaggagatcgagaccagcatggctaacacatggtgaaaccaagtctctactaaaactacaaaaaattagccgggcatggtggcaggcacctgtagtcccagctactcgggaggcagaggcaagagaatggcaggaacctgggaggtggagcttgcagtgagccaagatcacaccactgcactccagtgtgggtgacaaagcgagactccgtctcaaaaaaaaaaaatctatttagtatatattaaaatgattacattagcttatttttgttagtgttttatggtgtgatttttctaaattttacttttaacttctctttgttattaggatttagatatatatcttgtacatagcatagaggtcgtaaaatgggacctagagctatatgctaacattttattccttgtaggataagaaatgtagtcttgtaggagtcccctctcccccttgaagttgtatattatgtaaatttttggtcaataaaatattgtggaaatgacatgttgcttcagagtgagagcatttactcaccactataagactgcaaatttctcatcttcttgccttgacactcaaacaagggtcaataaaccatctatcagcctggattcttttgtgaccactatgagcacaggacatgtaacagaaatcaaaaacaaaaacaaacaacaaaaacttctcctacgtggagtccctgagctttggggatcttgttagtacagcatagactaagctatcttggcaagtatgagactggcctcttgaactggtatgttactaaaacaaaacacctaacttatgtgacactggcttaatacttgattcattggcagtgagtggcaagaaaaaacattactgtttactgtaaaacaagatagggagtggcaaaacattcgatagcagtcacctgtggttatgtgggaggtaaatcacatatttgaaagttttgtaactctagaaaaaaaatataattgaatatattaatggttcatttgacaattaaaaaaattgactttagaaaataattgcctactgtctagctaaatagcaaacagagggagatgctctaaaagaaaatgatatttatttgggagtaatattgcaatgagaatacatgtgccatagtaaattatgtgtgtattcagggacattagaaaagacaaggatttctaaaagaggaagattacataattgttttgagataattaaccttggatccaaggatcaggaacaagggtgacacctgtctaaggttagacaaggaggttctgagcagatgtccttgcagaagtatctttttgtgtagggttgcagtggcctttgtgcaatgttgttgttttgtagagtcttttctggtagctcttgttataagtcgtatttacattaagaactctcccctcatggccttctccagctccatttgtcagagttttaacacaagtgacttcattttgattctgacaattttatactactttgcaagcaggaaaaaaatatatcagaaagaagagtctagaaacttgagattttgcagagctggaagaggcaactgcttctcaacactgaatagtatttgagtttctaagcctggttaaaactcagccatggctgggcacggtggctcacgcctgtaatcccagcactttgggaggctaaggcaggtgcatcacaaggtcaggagatcgagaccaccctggctaacacggtgaaaccccatctctactattaatacaaacaattagcctggcatggtggcgggcacctgtagtcccagctacttgggaggctgaggcaggagaatggtgtgaacccaggaggcagagcttgcagtgagccaagatcatgccactgcactccagcctgggccacagagtgagactccgtctcaaaaaaacaaaaaacaaacaaacaaaaaaactcagccttaagactaggattatctcaagggtatggttgttacatccatgttaaaaattctgactagattatatttacagaaaaaggttcaactgacagttactgctctttcagtttgacaaggtaatatcaaggcagagtgattaaatatctggtttcctgaatgaagccttacaatgctcaaagtatctgatattaaatccagagagaaaagcagaggggtgaaaaagcaacaaaacacagcaaatataagaagcagcagactagacaaaaactgtgacttgtttgcttgtatgtgaagctgacaggaattaagtagactaaaaaattgagtttcttaaaaaattgtgcttctgaaagaaatgccaacccaaactaggtcacacgtgtcaaagtatattaaaatggaggccaggtctgaagaatccctaggcagacaaagccagttaggtctcatatgaccttaaaactgattgatttacaaaagtaagcaaaaattaacttgagctattttttataaatgcctatagtaaagaaaaacagaacttaaactcaaccaatcaaagacagccaacaggatagccaaacatttgattggttagctataaagttaccttatttcatctgtcctgtctttgcttttcttctttgtctgtcctataaaagcatccccatcgcgttccctcggtagagctccggaaccacctcagtttggagctttccaatttatgaaccatcatttgcaaataaacttttaaaaaactttagtgtgccttagttgaccttattaacacatgttgagctaaaaccctgtattagtctgttctcatgttgctaataaagacatacacaagactaagtaatttataaaggaaagaggtttaatgaactcacagttctacatggctgaggaggcctcacaatcatggtggaagacaaagaaagaggaaagggacatcttacgtggcagcagacaagagagagtttgcaaggcaactcccctttataaaaccatcagatctcatgagaattacttattcattatcataagaacaacatgggaaagacccgcccacgattcagttgcctcccactgagttcctccccatgacacatgggaattactcgggagccacaattcaagatgagatttggatggggacacagaaaaaccatatcaaaccctgttccagagatgcagtttaacatattatgagacaaatgggagctcacagacaatatgagaatctcttgaagattacactttttttcctagttctaaaattacatcttttttaatgagacttatattcttcccccaactcagaacatttccttgtctttaagggagacctgccacagatagagaaccatagaaaataacagtaacaaccacataaactgtcatgttagctatgaaaagagttggtggaaggaatgggctctcaccaagacagtgaaaaatagaggtaggtggtaaacaaatatgcaaaaggaccattcagaaacccaagcaaactatcattctccccattttactggtgctataaatacctgaaaaaaagtgccacagaaatggattagtgttatcatcaacaaatatatttgagccgggcacagtggctcacacctctaatcccagcattttgggaggccaaaatgggaagatatcttgagcccaggagtttgagaccagcctgaacaacataaaaagaccacctctctataaaataagataaaataaaataaaataaaataaaataaaaaaaatagctgggcatggtggtgcacatctgtagtcccagctacttagaaggctgagatggaaggattgcttgagcccggaaggcccaggctgcagtgagccatgcttatgccactgccagtcagcctgggtgacagtgagactcatatatatgtatacatttaaatatatgtatacatgggtgagactcatatatacagatatgtatatatttgtacgtatgagataagctggtgagaatgaggtcattgaagcagatatcctgttccttgccaattaagtcagtgatgaattccatagttaataccaccatgaaaatgtcctcctctatacctggcttctcttcagagagaaaaattcctaattttataattttttttattttcaactaagggattaatacaataattaagggattaaatatttaatatttattgtttcagtacttctctcttgctatgtccattaattccattgctcattgttaatttgttgttaattacattaaaatcagttcttctgtaggatcatgtcatattgatctttatgaaatcagagcaatcatttttcaaatgattcagctggcaattttcatactaacaaatattttagttttttataagagccacaggtgataactttccatattcaaaagaatacccagtgaagtctagtgttctcagatgcagttacggacagttttcctttcactgttttcacttgttgcttcaccctaaacttcaatttatgtacacattacagtccccaattaggagactaacaggatgttgaagaatggcattggcaggacatttctgaattcagtagcaggaatgaactcaaaaccagcagtactgagtcagttcttgttctcttctgactgaattcgtgttcatggaaatgtttctgcaagactgagtggtcacagtgtcagaaggctcctcaggttttgcctcttcacacatgtccatttcccctttgaccttctgccatgtcaagatacagctggaaagccctcaccagaagctgagcagatatcagtgcctgcttttggaacttcccagcctgcagaaacattaggtctttatagattgtccagcttcaatattatgcagccttaaaaaggaacaagatcatgtcctttgcagggacatggatgaagctggaagccattatcctcagcaaactaatgcaggaacagaaaaccaaacaccacgtgttctcgcttataattgggaggtgaacaatgagatcacatggacacagggaggggaacaacacttagcgggcatgttggggcaggacgggggtgggagagcattagagaaaagagttgatgcatgctgggcttaatatctaggtgataggttgataggtgcagcaaaccaccatggcacacattaacctatgtaacaaacctgcatatcctgcacatgtaccccagaacttaataaataaataaataatacatttttaaaagatccacatgatcaaaaatgcaaaaaaaaataaattatccaacttcaggtattcttttatagcaacataaaatggactaagacaaaactctgtggtgaaatctccaattatttgtaagatgaagtcgtagaaatgggtgaagtccaaaaagcaggttataatctatataaacatttaagacttttattaatattgacaaagtcccctacaaaatgcatgcaccaatgtaagctctcactagcattaaacgagactgctcgtaactttgcacacattataattctatgtaacaatttacaaaagcaaaatgtggccaatttgaaatgcaaaatagagcacttgttattcattttaccatagtactatactaaacttacgtttttgtttaaatgtgaggctgaattttttatatatgataatctggtttttaaaattatttttatcttttttataaaacagtaaaagtattaaatttttttctactgtttatattgcaaatagactttaaagtttttaatctattatttacctttctatatttattttcttgaggcattcagaaattcttccagtcatgctattaaatgcattcattttaaatgtactctgcctttaatatcatgtttaaacatgtcttcccaactttcaagattacaaaacaattcttggtattttctctgtttgattgtttactttttcaattctatatttaatcctcttatttactttggaagaagaagtatgttacacatttgtcttatttcaaattgcaatattgttgttacaatactaattattgcagggttaatttttcttcacatatttaagatggaaaaatctatctcacacaatatatttgtaaacaaaaaaagatatttataaactctataatttttttgttgcactggagtttcctcattctttcatgatgttattctatgccactctttaaagagaagtgttggaggacatgaaaggtgagaggatagacatgtaactatttgttggacacctaacttaggatggacagattatattatttttatcagcaaatgtgaactcatcagtcttttccttaatgacatgtgcttcctcaaattaaaggcagtagagtcttattttgattttcttgtaaaagttttaaagaattgttttcaaatctaaagtgatagtacatctaatgtagtttttctgtttgttgtgagttagaaatacaattttgtcccaatattaaatgacagaggtctcaatatcattagttgaacagtctacgttttttttttgttgatttctaatgccaaatctatcacgtacggaggttcctatgtgataagaataaacaatctggtctcaccagacctgtctttagtttgatctgctgacctattacttattatatacattttatttctgtgtcacaaccttcattgttttgatttttttaataatttttttgagacacggtcttgctctgtctcaaaaaatattaaaaaaatttttttaatcttttttttttttttcctgacagagtcttgctctgtagcccaggctggagtggctcaattaaggctcacttcagccttgacctcctgggctcaaacaatcctcctgtttgattctctgtgtagctaagactacagttgccactatacccagctacttttttgatgcttttagagacaaggtctcactgtgttgctcaagtgggtcttgaatgccttaactcaagtgatcttcccatctcagcctcccaacatgctgggattacaagtatgagccactaaataaataatttaaataagtcttgctatctactggatacccctaccttaattttctttttcaagaattgtctgaattatttttgaatacttaattcatgtgtaatttaggactgttttgtcaatttgaaaataaatttctttaagattctggttagaattatattgaatatgtgaattaatttgagcataatcaatgtctttgaaaattaatttttgcatatctatatagttcaaatccttcactaaagtattatagttatgtaatttcacaatatataacatcatgaaacacttttctgagacttagtcataatcaaaatatagttcttatttgtaataagaaagggaatttttttaattccacattttaatggaccagtgctggtgaataggtgtaattttagcccatatatattgatattgtactcagcaagcttatcaaatttgtgttatttcaaaagttttcctgttgatttttaaattatctaggtggaattactactattagtatataatttctttaaatttccatccaaatttctatgtaacaatatttttgtcaaagtgtattagttaaatgacctaacgaaattgtcaataaacaagtatctttgtcttaatcttgattaaatgaaaagctctatgttacactaataactatgcttctgtatttgtttagtagacatacaagttattaaatgttgcttctatttaaacttggtttgggtatttatcttgattaggagttaaattagattaaacatttttgcaacatctgttgagataattttatgtaaattaaaattatttactttctagttttaaattatcttcaaattcttagaatgaatcttttcatttgtaatatattttaagtatatattatgagactaatttacttttacacttttttttagcagttttgtgcctgtatctaattgcctaccttctcattatttgctgtcctctactgtttttactcactttgagaataattttttaacttcttaaaataaatgagaataaaacatttaggttcactgaagtagtttggagaaggtaaaaattatgacatttttaaacttagtaaaagttttttataaatccatctgaatttgatatcttgtgtatattttgatagtccattcaaaatctttgaaattgttgatttattaaagttttttactactaatataaatttttgttaacctatgctttttaaaaacttggcaatttcaactgagtttttaaattttggaataaaattatttagaactttgattatataaagctctgctatttagtattttctacatttcatcaatttttctgcttctcgtatttcttgatcagtaccatcagacttttgaatttcctaatctttaaaagattttggttgtactaccattgtctattatattttgattttctatttatttattcattcatttatttatttactactttgattttggttgacatccaaaagcataattactgcccttcagacaaattctaacttttccttttgctgagtctatgacttgggaaatttacttaaccttgctatcccttggatttttgtttgtttagtttttgagacaaggtctcacgctgtcacccggggctggagtgcagtggtgcgatcttggctcactgtagttttgacctcgcaggctcaagtgatccttccacctcagcctccctagtagctgggactacaaaggtgcaccaccatacccggctaatttttgtattgtttgtagagggcagtggggtctcaccatattgcccaggcttgtctcgaactcctgaactcaagcatccacctgtcttgacctcccaatgttcggggattacaggcaggtgccacagcaccctgtcatgcctctgattctttaaaaaccaaagggaatgagactgtttttaggaataaatataaaataaatagcacacctaaaccacctagaacagtaccatgtactaagtaagcgcaaggtacatattagctccttcttaacttattcacccttctttaaatttttctgttgttcatttttcttaactgaaggtgaatatgtgcctcattcatctggaaaacttttttataaaacatgtactaatggatatggattcttagctttagccggttttttcattttgattgtgaaaagctttttcgttgctgagttctaaacatttatcttttatgtagaaatgttcatctttttctcagttatagagaatagttcaattttcaaacttttttgattgatttaacattttactactttacattctacgtaatacttattccatggaatctgttctttgttatagtgtacatggtttaggtgtgtaaatgtttcatgtgtatttgaatgtttgtgtccagatttctgtcaagtacagatttctacataaaagtattgaattaatttttgctaattgcattcttaaaatattccatatcattctttcttctgcttgatatggcagtttattaagtgtgtcttacattcttattatttgtggattcttcagtttctgtttgtgaggcttctgctttatctatttacgtaatgcattgttaggtatgtccaaattcatgattattgcatcttttccatgaattttttctttttcttttttttgagacggagtctcgctctgtcgcccaggccggactgcggactgcagtggcgcaatctcggctcactgcaagctccgcttcccgggttcacgccattctcctgcctcagcctcccgagtagctgggactacaggcgcccgccaccgcgcccggctaattttttgtatttttagtagaaacggggtttcaccttgttagccaggatggtctcgatctcctgacctcatgatccacccgcctcggcctcccaaagtgctgggattacaggcgtgagccaccgcgcccggcccttttttttttttttgagacagagttttgctcttgttgcccaggctggagttcaatggtgtgatcttggctcagtgccacctctgcctcccaggttcaagtaattctccttcctcagtctcctgagtagctgggattacaggcacacgccaccatgcacagctaatttttttgtatttttagtagagatgggggtttcaccacattggccaggctggtcttgaactcctgacctcaggtgatctgcccgccttggcctcccaaagtgctggaattacaggcgtgagccaacatgcccagccttcgatgaattgttttattcttactactctgtaatcacctgtctttaactgttactgttgtttactttaaatgttatgtgattattagttataattcagttaaatatgacaaatataaacaagcaattgaatatatgcatgtggaagagcatctatctttcacataactaaaaaatacataggaaagtttttgtggcacaaattgtccaagggaatagtgtgattctatcaccaacaaatgataggataatagacattaggcataagtagcagttactgtgctcattagttagtggtagattctacccatttattttctgtcactgtggttttctgctttaggtatgcctcttgaaagcagaacatagtcgtgttttgttttcttatttattctctgtcttttgatagatcaagcaaatttatttaaattcatgaacatttctgataacattgaacttgcttttactgtcttattaaaattttgctagttatcactctcttttcactctttttttgctttgagattaaagtgataagttctttttattcatttctccatctgtttttttttttttttttttttttgagacggagtctcgctctgtcgcccaggctggagtgcgatctcagctcacggcaagctccgcctcctgggttcacgccattctcctgcctcagcctcccgagtagctgggactacaggcgcctgccaccacgcccagctaattttttgtatttttaatagagacggggtttcaccgtgttagccaggatggtctccatctcctgacctcatgatccacccgcctcggcctcccaaagtgctgggattacaggcgtgagacacggagcccagcctcatttctccatctattctaagtttctatttttatataacaaatcattccccaaattgcaggcttaaaacagcagtttattacttttttcctcacgattctgtgaattgcctggacttagtggatagtctctcattgtggtatttcatgtagttgccatcagataagggatgggaccacagtcatctgaaggctcaaatgggatgaacatctacaatgatccaactcaatggctgacatagggaggattccctctttttctactgattggaatagtttcagaaggaatggtaccagctcctccttgtaactctggtagaattcggctgtgattccgtctggtcctggactttttttggttggtaggctattaattattgcctcaatttcagagcctgttagtggtatactcagggattcaaattcttcctggtttagtcttgggagggtgtatgtgtcgaggaatgtatccatttcttctagattttctagtttatttgcatagaggtgtttatagttttctctgatggtagtttgtatttctgtggaatcagtggtgatatcccctttatcattttttggggggtctatttgatttttctctcttttcttctttattagtcttgctactggtctatcaattttgttgatcttttcaaaaaaaccaactcctggattcatggatttcttgaagggtgttttgtgtctctatctccttcaattctgctctgatcttagttgtttcttgctgtctgctagcttttgaatgtgttggagagcagtttctcataaaagcttgtggattcaactgtaaaagtggcaatccactctgactcccctctccactgcagagagctttcttctttcacttattaaacttttgctccaacctcacccttttgtgtccacactccttaattttcttggtcatgagaccatgagctcagataacaccttagtaataatatcaatgacccggacctgttttggtaacaccagctctggggccaggacacaggggcactctcaggcagaagactgaaatctgtgcaagtggtatacaaatttatcccttcatacacaaatctcaggccagtctctctcttggacttctaaaattttacattcattgtgatgagaatcaacatttttggttcatttcaaaggacaggctcaagttttgccaatgctaatatggctcagcagaaaaatgcatgtggcttgtattaagaaagcacataaaggatctacattgactgggttttcataatcacaaaaaacgaataaatttgtatgagtatctttatatgaaggcaaggaggaaaacaggtgaatggaagcctacgtaaatgtgcttatgatttaaaacaaacttatttcctcaggaaaaatatatttttcacctcacctgttaaagtcttaggaaagcttaaccttgataatctcctaataacagaacttatgtttcttttctgaacctcattccttctcatattgtaataatgaaatgaataaatgaatagcaagtgagtagtggtgcacactaaactctgagtactgactgccttctattccacttaatacctttataagaacattgttatgtacctaagtcatgtcatctataaaactaaggtaatgataacaatcatatgtccctaatataatggttttgatgattaagtggaacatagtaaatgtttaaaaatgttttctattataaccaatttggctaggataggtggaaagaatagaaatatgataattaattgtgaaatgtataatatatattaataggtcatcaacatcaaattaaaaaatatagatgattaccatgatagtgaaaccaaagtttttagacaagtcaaagcaaagttgaagtctcagagaccattgtgtttatttgctaactgtattatcagactgcttagttgatacagtgaatacaataattcttccaatgtacataaactgccagacaagcaactcaatgcaattcactcactctcggagaagtttatcccctctgccaatgttcatctttcctggcaaaccatccttcagtattccaggcaaactagagcaaggtgaagttgaagaagatcctactttatattccattcagagagcttccgggtcttcaaaaaagatttagtcatgtgggtgtgaaagagctgagtcatgaaatttggaccttattgtaagtccagaaggaaaaacaaggggtttgaagcacaagggtgatatgatctaatttctacttttaaatgatcactctgattgtcgtgagggaactgatatgggatgtactgggggaagaatgttaccaggaccaggtcgaggctgttaaagacctccaggagagagcattgtgggccgaacaacaagcttctagtaaagatcatgcaagtggacacatttgagatgtattttgaaggtggaagaaattagataagctaatgggtagtgcctggagggagtgaggatttttgaaccactaggtaaacacctgtgagtaacagagaaaaagttgggatgtgttatgaaagatgaatcctaaaatttcatatgttgaagactgatgcttcaggacctcagaatgtgaacatccatagtagaagggaattgtgttgttgacggctgccacccactctaggtgcccaagctcctgcagcagtcctacttctccctttcacccacactcactcccagacagtgtccctttcagctcttccatcaccccttcttttgatttggctggtgagagcatagctggtatttatactttcttgatatgctagtctcttttgctgattgttgacattggagaaggtcatggaagggacctgagctgagcgacctttaggagcatttcctgttcttttcctgtactctgctgccaaggagaaatctgtctttcaccaggcttgcagctttctccgttacccacatcatcaggcaatatctgtctggcacccctctttgttccctttctctggccttcctttttgacatgatggttgacctgaaatcaccaaggcaggactgctcatctccaggtctaatggaaaacagtatctggtgaaaccaaagaaaataatcccagtaacccactgggagctgcttggcttaagcacctaccctgtgcctaagatacaacccatcaagcccagctaaaactgatccagtttccacagggccagagaagaattgccaattaagaatgcattcccacttcaaatatgtctatatttatttcagggaaaatatcagtctgcctgggtcccttatgagaacattgttgtctgtagaaaaatctaatctattaggaagccttcttgttttgttatctgcaactcttcagaagggccagaccagaccctcgtatgcacagtacaggatccacccatgcacatctgtctagggccttgtctttatgattttctgtcacatggcctctcagccatgcctccaaccaagctatcctcaaataaacactagccgtgcacaaaaagtgaaaaattacacaaggcctacacaaggtctgaaatggaaagtgcagctggtgataccgagtagtatattttatgaattgaggaacagggaatttctaggtatcacagagcaatcagcagctgagaagaggagtaccaatccaggaccctggaaggatttttcagaaacttaatagtttattgtccaattgtagagacaaaaatgaaaataaagatagtgaggagtaccatacaccattgcttagaagattaaataaatgtcatctcccacaagtcatgtggggagaaaaaaactatataggaagaaaattacaaacgacaaggtagtctcagcatataaaatatcaacaaatgaatgtaagaaagagaatgagaaagaattagtattagaatatcatagaaaaaatcatctttgtgaaagaaaactctgatgaaactggtgacataaatactgagtaaaaaacagaagaccaatcaaggcatttgaggcttgaacaggcattacaaatcatcaagttgaatatataagtatggccacttagttattagtggtgaagactacggtatttgttagaagaaataaagtagatgatgaattctatagaatattctggagaaagtggaggtcttagctacatgacatcgtgtggctcactttgggaaccatgtttcagtttgtttaggtctagaaattccttggtggtttctgtgttcagttttgctttaataatccctaaagatattttttaaaatacaaattttttagctttcctgtattgtacagcaccaacgcttgcctgagtgtagtgagattcacagagtttggaaatttcctgtagcatgaggaggctgcggggcagccttctgtcatctatgtgtacccagcagtgtgctgtcctcacacaactcacggataagcagaaagcatctctattacatgaaaaatttagctaaatatacaaatatccatgcacacacatcatgagagatggaaataggctatcaaaagagtcagacatattgaccgtcttcactgttagctgtaggattgctgcccaaccccctgacacacccacacaaactcacatacacasaaatgaaaagcacagtggaaagcagaatagcagtctttccaaacagattgaaaaacaaatgatgtctaaagttcaatcctgacactgtgctgattgcttggacacagttccgtcaaaacatttgtccaagtcatagttgtaccttttagaaattagccacaaacaacatcctccccaacccttcctgctaggctagagtcccagaagaaatgagggatacacttgacctgaagtaagcaaagcagaacccagtctctgaggcgaggaggcccacctggtagggagctcaaatgcgccattgtcctgcttgtctttataaagggagctgacacgtttctcccagcataaagttgggagtgacaccagagccttctgcaagatgcttctgattctgctgtcagtggccctgctggccttcagctcagctcaggacttagatgaaggtaagccgaattgggggaagatattgtgactctgattggggtttacgggcgaatgctatagagggggaaagtggagggaagagaggaggatgagaaaacagataggactgaagagttctcatgccaaggatcagaagacctgttgtgccttcattcctcatcaagacctcataatttattgattgcacaaatagaacccaataaagaatttgtaccgggggagtgagagagtgagatttgcatttatagagacatgggactgctgggaaggatatggagaatgcaagacagattcagggaagtgcagctgtgaagatcctatactgatcccagtagacagggatgatggtggccttgctggacagtggatgagtatccatgaaggagataaacacatgtcagagctattgctgaggcagagaattgggtaaacacttgcctctgtctacatagagttagagaatcaccagagtgaaatattgtcatttttttctctcctgcatgtagtattttaatgtgctgggacgggcatttgtaagattgtatctaagtggctatgtctggtggctcctgttgagaaagcttgcaaacataaacaacatatttacagatgaaagagggcagaaggatccccaaatatttcattgaaatactcaagagccctttaactaaataagcactaaggcttaaggaatcatgagaggacaaacaggggcccttctatgttgagttcctggttgacgctcagtgtagtaacaatcctgctttcccttacatcttcttccacttccggtagcatcagagagtggctgatgagatctcaaaggggatgcacagggtgtgatcagaggtcctttatcctcgtagaacactatgagctctgaatgattcatgcagtaacttttcccatcatcctgtacttcttttctagatgtcagccaagaagacgttcccttggtaatatcaggtaaatcccaataaattctcagtaaactctgtctccatttttccctgaaaaattgatcagttctccagtgtcttcttatcatccttgtcaggaattggctaatatcagtgccccagagatataaacagttttctcccaaccttgattctggggaccatgagtaaagaaatttgatttttcaccaccctaatgtggattaagaggagttctaattaggaagccttgggaaggggggaggttgggagttgagaggcaggtcagggagagaggggccggccgtgtggtgaagacagagagatatgaagacaggagggttttccagcatgagctcagctcttcttgtttcaactcacacagatggaggagactctgagcagttcatagatgaggagcgtcagggaccacctttgggaggacagcaatctcaaccctctgctggtgatgggaaccagaatgatggccctcagcagggaccaccccaacaaggaggccagcagcaacaaggtccaccacctcctcagggaaagccacaaggaccaccccarcagggaggccatccccctcctcctcaaggaaggccacaaggaccaccccaacagggaggccatccccgtcctcctcgaggaaggccacaaggaccaccccaacagggaggccatcagcaaggtcctcccccacctcctcctggaaagccccagggaccacctccccaagggggccgcccacaaggacctccacaggggcagtctcctcagtaatctaggattcaatgataggtatgattccagtttattatccatcaaaggctccaactgctacagttctccaacttcattgtgccagtgaatctattgaaaagctgttaatatttccgtgtcctggaacacatttctcatgagttttgttcaaatattctgggataaggtagcaagatcttgtttttaaacaatctcttgaaggcaattccaattttgagaatcactatcttcaaattacctctcttaaatagggttgggaatgaggacatagaatcatgttctccctttggcactctgtttcctttcctcaaactcaaagactcccatttatttaaagttttacctgaacactccttgttcaggacaggctcagtcctgcctcacactagcatttcaagtccagtattcctgctaaatggtccttggacttttagctgttaaatggtatctcattttttaaaacacatttcacatttaaagtcatacatgcttaagctaacaaaaactaatctcactgaatagacatgtaccaagctaaatagcaattcatttctcctcccctctacccttaccaaaactcccactttttactgtttggaaactcctctttgaaatatttattgctacataactatatataattttcccaccactaataccacactttatattcagttctgtgtcttacttattggaaaaatttatttcttagctttcacatgagtttatttagatctcttcagtgtttaytggttagtttttttttttacaattatatatgatgctattgtttggtttttccataatttacttaaccaatccttgtcactgaacattaaggctgctttcacactgtccctattacaggatatgttgcagtccccatctttctgaaaataacccttaacgtatccaacagccacaaagcatgaacaacctaacaataatcgtttttcgtcctcatctaagcaa

SEQ ID NO: 3 - DNA, 97650 bp, Homo sapiens
  modified_base (18816)..(18816): a, c, g, t, unknown or other
  modified_base (43817)..(43817): a, c, g, t, unknown or other
tcaactcctgggctcaagcaatcctcccacctcagcctctaaaataactgggactaccacccagtcaaatgccaccacatttgactaatttttataaatgttttgtagagatagggttttgatatgttgcccaaactagtcttgaatttggggcctcgagtgatcctcccacctcaacctcccaaagccatgggattccaggtgtragccactgtacctaaccctcttctggaaaatcttaargccttagattgcattcctgtctttataggtcatatttctcattattctcttctttttgaccttttctttgcaacttgagagttttaaaagttcacttattgtgtaacttattcattagtcctgatatatcatttgcattctttactactcccaactgttatttttattctgcagtagaagtttgtctttattcttttttgttttcttttctcatattatctcatcttttatatcattaccttcctttcagcctattctctttgttggttctctactgatgtttcacctagattttcattgtttaaaggcattcatcagattatattgcaacatttttattgaatgcagccagaatttatgtgaggtatgtactacctctgagacttgagggtgatattctgatttgtttagggtgcaatgagtttttgtgtttgtttatgtttctataaaccatccaggcccaatctttatttttgtcaatagttaaagaaagtgaagcatcttttgcctcctctacaatccatttagttaagttcagtttttctttctcagacctagagttaaagatcaaatagatatgttcagcatttaatcaaatttaccatgcatagtaggtattccatgtataggtttttgacagagatttactaaagttatttggtctaattatgacagagcatttattccagacactgtcttgtttatactacttatcactcagtgactaaatcttccaaaacaaaaattattgtcatctcaccctctctacttccataaccttacggtggtttctgctttgagtagtagtctctggatatttgtgaaagagtgtaactgagaaggcagcaggtagtgaataagagaacaaagtctctggatactaataaagatagttctcatatagttcaggatagcttgctgcttacttggccataaagctcttacagcctaaagttaggcataatcaaaggaaatattgttgcgggaagtcagggaccccaaatggagggactggctgaagccatggcagaagaacatggattgtgaagatttcatggacatttattagttccccaaattaatacttttataatttcttatgcctgtctttactgcaatctctaaacataaattgtaaagatttcatggacactaaccacttccccaatcaatacccttgtgatttcctatgcctgtctttactttaatctcttaatcctgtcagctgaggaggatgtatattgcctcaggaccctgtaataattgcattaactgcacaaactgtacagcatgtgtgtttgagcaatatgaaatgtgggcaccttaaaaaaagaacaggataacagcaattgttcagggaataagagagataaccttaaactctgactgcctgtgagccgggtggaacagagccatatttctcttctttgaaaagcaaatgggagaaataatgctgaattctttttctcagcatggaacatccctgagaaagagaatgcgcacctggggataggtctctaaactggcacccctgggcatggtcatctcttatggtcgagactgcagaggtgagatagactccagtctcctatagcactcccaggcttattaggaagaggaaattcccgcctaataaattttggtcacactggttgatctctcaaaaccctgtctcctgataagatgttgtcaatgacaatggtgcctgaaacttcattagcaattttaatttcacctgggtcctgtggtcttgtgatcttgccctgcctccgcttgccttgtgatagtctattaccttgtaaagtacttgatgtctctgacccacacctattcacacactccctccccttttgaaaatccctaataaaaacttactggtttttgtggcttgtggggcatcatagaacctaccgacatgtgatgtctaccccggacgcccggctttaaaatttctctcttttgtactctgtccctttatttctcaagctggccgacgcttaaggaaaatagaaaagaacctacatgaatatcggggcaattccccgataaaatatattatatagggagactcaaagcatatttctaccttccctgtactaatttgaaaaagaatatatatggttgataaatatatatatatatttagaataagtattaagccccaatgttatgcatactcaaaggaattatacaacataaagagaatcaaagtatatttctactytccttggactaattcgtcctgttctggttgtaagtatgggatatgaaatacatagatgaaatgtatgcttttgaatctatccccaatctcaatttagttgtttcaaattatttgagaatttctcatttatctttctctaacttgaattatggagcctgtggctttatttttttttttttaagtttttttttttttggtcagttgttgaaatttttaaacagatatttggaggaggtgtatcagagccagctagttttaagtctcagactggtcactcttaaaataatcccacccagtcatgccatcatcaaatttagttgcctctctccttggcttaaatttaatacattttttccccaatctattggactctttagaaatgttttaaacaaaaatgactaatttattttttaaatgtaattaattttgttgattgaataagaatgtttaaaaatgaaacattattgtgaaaattaccacatccttggtttaaaatagcctgagaaaggaaagcacagccataagaaataaatatacgaataggttaatacagaggaaattgtgccagacaaagctggttgcttttttgatagctttacagccttagtaaatgaacagagtggagtagacataatgcatcttgacttctagcaaagtactggagacaatgtcgtgtgaaattttgattgcaaaattaatttgagttggcttgaaaaacactgttaaaggaaatataagctggttgaaaagacatacagagaagagtgttgattaatgtcagtgaactaatgagttgagtgatatctccagttaaatgtcacgattgtgagtgttggattgaattatttttgttatctgttgaaaaaataaataacatagggttgattaaattagagcagaaaatttatcaggagacaccagtgattacagaaaatctatataaagacatgaattcatttcagagaaaaaccagtgaaacaatataattttacttaaagagtccatttttttaatcacaaaatggaattctatgaagtatcaatgcttaaagaccttcaaactacagaatttctcaaaactaaytggaaaacaaaattaactatctcagtaaggctagaacatcattttaatccagttagtagctacattttatcccaaccaataaagtgacagttaattcttacctagaggatgtggttaaatgtataattattatttaccagaaataaaaaaagtatctagaaaatcagtaacctctagaaactcttgggcacaggagagggagaaaactatggaaggggaagtaattatgttcttaactatgttacattcttaagttacattcttaactatggggatatagtaagactctaaataactaaagtttttttttattatactttaagttttagggtacatgtgcacaacatgcaggtttgttacatatgtatacatgtgctatgttggtgtactgcacccattaactcatcatttacattagatatatgtcctaatgctatctctccccactcccacctctccccacaacaggccccggtgtgtgatgttccccttcctgtgtccatgttatttttgaaatatccagattaaatgtagttaagtaaaacaataaactttttcaatgtaggttttttaatgctaatgaaaagctagtcagcatggggtaaattagattaaattagattaggtaaattggaataagaatcaaatgatcacaatcataaaatgggattagtcttactataagtcacacctgcaaaaggaagaagataacctggaaaaatttaaagagtcttccactttacgaagtcgtagtgagttggcaagttttaataatttaaaagaaaacgttgatttcatctaaaaagagagagagaaagttttagttattgattcaacatgtatttattgaataccttaaatgtgcactatttttggttttgtgagcagtcccaaacgattaaaacagagtgacttgttccctgactatcttaaattatcgcaaactgattggcttaaaacaacggaaatttattctctcacagttttggaggccaaaagttcacaagcaaggtatcagcagggctgcactccccctaaaggctttgggggagaatgattttgagcgtttcagcttctgttagctgtcagcattctttgatttgtggcaacatcactccaatctctgcctccatggccatgttgcctcctcttctgtctgacaaatctccctctaccatagtcttaaacaaacagttgtcattgggtttagtgcatattcatgtaatctagaacactctcccctctcaatacttaacataattatatctgcaaagatcctttttccaaataaagcaacgtttgtttccaaattttaggatttaatatctctgggtgaccatgatttaacctactacaaaagcattttctaacaagcagcttaaaataggtttcttttttctttgagacagggtcttgctctgttgtcaaggctggagtgcagtgsacagtcatggctcactgcagcatcacactcccagtttcaagcgatctttccacctcagcctcccaagtagtttagaggacaggtgcatgccaccacacacagctaatatttcatttttttgtagagacagggtctctctgtgttgaccaggctggtctaaaactcctgagatmtagcaatcctcctgccttggcctccyaaactgctgggattacaggtataagccactgtgccaggctcaaaattaggtttctattgctgcattaatatatacacagrgccatctctttctcttctaattattttacaaatataaagagcatctgtaacacaatgaagctgttttccactttaggaaaagacagttttgaaaatgtgattaattatttgttgcaggttaggcttcatacagtcatattcccagtgcacattgtcctcaagatctccccagtttggcactgaagccttattgactctgtctctgaaagaggccttaaatgatcccccttccttctaatcctcactgaaattcccttaggttaagcccaatttatccaagggctatggtcttctacttgatgttctgtttttaatccttgatgctatccttctccttccatacaaacagtagatacacatattttcaaaacacagactttcttgtgttctctacttaaaaatctgtctagctttcagatacataaaggaaaagcaacctggttttaagagcatgcaatgyttcttcttaaatttccgatccctgtccttgtctgcagatttatcacttaacattcctctccttgcttcataatactacacacacagacatacacacacacaaacacacacaaacacacacacacaaacacacacaaacacgcacacacaggcacacacacacacgcacacacaaacacgcacacagagacacacacacacacgcacacacacacacacgcacacacagttccttgatattgcagtcacacagaattgttcactgtttcttgaaaataatcataaactgcatttgctcatgttattttttgagatcagagtgttcttccctcttttttctgctttaaggttttctctttttttgcacagctattaaaacttggccaactattatattttctctatagttttccctgatccttacacatcttcatagctccttacatgtaactctattactgtgtgcatcatatgcgatcgtgtttattttccctgtgtgatttgttttttagactatgaccaccttgaagacagaactgggtcttatctatctttacatctcctagttgtttgcatggttcttgacacatagcaaatgctcataaacttctgatgaactaaattactgtaaattaaagtcattgatacatttaaatggcacgatttacctatatctgttttataatcatagttaacaaattaagcaaaatacttctaggaccaggaactcaatatggagacactccattgtaagagagaaagatgcattgaatcgtttattcagaaagaacttattatgtcactgtaggcactgcacaaaggctaaaaatcccaaaatagaattgttaaaaaattagggtttaagattaaaggcaaaggaaatcatatttgttgagactattagggttgcttgaagtaaactaatgccaagtttaagtaaaaagattcctgctatatgatataattgttaagcctaagagaccagcaggcaccaggtacagttacattcagatgctcaagcaatgccattagggaactgcccatgtttagccattactgtgttctgttattccttttttttttgttttgttttccctctcaggcagattctactcatgtggtaacaagactattattctagatactgtactcatatttaacagtctcagggaaagagtgaagccttttactcaatcgttccagaaaatatctaatggatgaagggaaggctctaactggccttcgttggaccacttacatttctttgaaccaattactctggtcagaagatgaacatgtctgatctttcaggattagattcacatgcaaaataatgttacaattcaaactaggaaaaataaattatatatttttaagagactggatgaaaatactccatacatcacatgtgcttttctttttctgtatattggtatatacataatcactatttctttttttttttttttttttttttggagatggagtcttgctgtgttgcccaggctggagcgcagtggcatgatcttggctcactgcaacttccgcctccaaggttcaagtgattcttctgcctcagcctcctgagtagctgggattacaggcacccaccaccacacccggctaatttttgtattcttagtagagacggggttttaccatgttggccaggctggtctcaaactcttgacctcatgatctgccagcctcggcctcccaaagtgctgggattacaggcgtgagccactgcccctgacccaccactatttcttttgtaattaaaaagtacatatacactttatattttgatgtagatgtaagaatagcctctgcttcaaagacctcattataatagtattaaagacacacaagtaaacaaaggtaacaataaaatagtaatacatatcaaatattaagtatctcaggaataattattccttctaaggaatggcaaagaaatttttcacaccacaaagttaattttgaattgggtcttcaaggaacataacaatttgaaaagacagagaggactttccaggaaaatgtaactacatatgcacaaatgacagtagggattatagtaakwacacttttattattattctacctcttcactctattcaatttccctgactactacaatgtccccatgttggtttctcctttcttgtattccaagatattgtgtcctgcttttgcttattattctctaccccttaagcttctcattgcttcctccttcttttctcttttttctgggcctccctctttgtttttacgatccctgggaggactcatttaattgactcctaaatggtttctgtgtctctagtgtcttgtagacattagaggcacagaaaccatttttcactgtctattttccactcggcatccaaactaattttccataaacattgcttccatcatggatatgtgctttaatagcattggaatcagacagatcttaagcacaatacaatagtatatataccagataccagttatatgactgtgagaagatagtaacttctgagagtctcactactaatgcccaacttgtaagataattatgaaaatatgtacaacatatgtatcactctcagcagtgctagccactagatagatgtgcaatatataagtagataatacttttgtgggtatctatattactcctttgcccataaccaacagtgaaccatcatgttcctttttaagcttggtggtggatacaggtgttcactttaaaagtctcagtctcagatttcaagtcttcaacccatctcctaagctgtcagaggcctttacaatctttacctacctcctttattcagtcttatttcctatcatttccccacaggaactatttgctggccctttaakttctcccttacctcagaacttgctaatatttatcactcttaaatatatgtttttgcttgtgctgttcctcaaactagaatttttctgccatcttttgttatcctctctcttcttttagtttaaataccttctgttctctaagttttttttttccaggacaacctagaaaaaaatatctctttagtttctacagtggcagaaggtaatgtgatttaccaatttaattacttcatattacaatatagtgaccatttatatcagtgtatagtacaaatatgtatactgtggtcttactactgattatcttattcttatttattgcctctccaacaagatgttatcacccatagacaagaatcatattttatatatctttataacccaaagtgcctttttaaaattaatgtatcatgtttgttttcctggaacaggaactgaaatagagagtatgaattcatttgtaactgaatctttgctgtaatagttatccccagcatccttgctaatacagagaatgaagccttaatacctaaagcagccactgtrtgtgattaattaacttctctcctatgcatcttgacaggtagtggctatgtgccattcttgggagaactgggaaaatggtcactgaaatcatttttgttgtttctagttccaatgagaaatgccagcygggaaaggctgctacagtatgtagcaaggtgcttttgctgaaataataaaagtatttgcaaggaaatacttgaaataagtgctaaatttccaaagattgatctacactacagaaggcttattagggtatattgatactagtatgtgttgtcttaagtggtacattgtagtttccatgccaattcttggtttaaaacgcagcatgcatctgttatatgccactttccacttaaatgcctaagacaggtagattgcactgtcaagttaggtcattataactccaacagatgttgtcatgtagatgaagaaaattcattttaaatgatatcatttataaaatgtgtttttctttgtacctaaaaaaggcaataatatgtcatattagctcttcagattcaggttgcaatcagtatggcatgttttgattaaacacttcacaatttcaaaatcagtgcaggataatgatggagcacatgtgaggaaacagcaatagcaggggtgtttacagtatcccagttgtttcaagcttaataacacttcatgttatcaatcagttacaaaggaataattggtggataggctgaggaaatggtacagtaagaaattgtacttattctaaactatagggatggaagtgcagccaggtcaatacttatttggttagtatattgtaactaatcatttgagttttgccagctggtatcttatttttgcttatttgtttaaccgcttttaaataagtatataattttaacaatttaagtcagttgaaatcccccccatagagctctcctccaaatgcatccctagctacattcttctttctggagattaaccagaaattggtggtttcatcctgtttatatgaatacattcctagaagataaaatcatattgtagatatttgtgacaaaattttcctcacaactatatgaaagagaacgaaggaaggtgtgtggttaggagttagctgtcattaaaagtgtgtaaattttgcacgttccctacatttattttccagtaaattttactagtttctttctaatcagttgggactaaagtcaatcgacctgtctctgcttctttcaatttcatttcccaaaagaattttagtgcttctctattattcttaactctgccttgccccaatacattaatcaatgctttgggtaacaacattagatttgtacagggaaggaccagggaatggcattccaaagcaacacatggaaagggcaagagctgaatttcataaaccgtaacctaatccatcactgcagctttccgttgcctctacccagactgcagccaaacatactctaagctgccactttagagtatctttaccctccatgggagtttttctttttttccctttttttttttttttttgagrcagaatctcactctatcgcccaggctgaagtgcagtacaggatcttgtctcgctgcaagctctgcctcccgggttcaagtgattctcctgcctcagcctcccgagtagctgggattacaggcactcaccaccacgcccggctaatttttgtatttttagtagagatggggtttcaccatgttggccaggctggtcttgaactcctgacctcataatctgcccacttcattttcccaaagtgctgggattacaggtgtgagccaccgcgcctggccaggagtttttcactgtgatgttgtgtaggtctctggaatgtatgtttccctctgcagtttccccagtgttgattttaagggaggaagccagagcacttgctatttcaccatcacacttgtttgaagtgtgagttaccatgcaatgtttaaaacatgagttacacctttttggaggatgctgtagaataccgatttattttttgtgtgaaaacaaactctacctcaggttaatcaaataattactgaagaaaaggtttttctttattcaaatatttcagcacatgaatgaagaagaaatggtaaaagtaaaacatgaacatttggccatcactaattatattagtttgtagaggctactgtaacaaaattccacagaccaagtggctgaaacgacaaaaatttgactgggagttcaaaagcaaggtgccagtggattgggttttccctgaggcctctctcttcagcttgcagatggccaacttttccctgtgtcctaacatggtcttctttgcacccgatggctctctttatggtctaatctcctcttcctgtaactacaacagtctgattagttttgggcccacccatatgatctcacttaaccataattatcttctttaaagaccctatcttcaaatgcattgtgaggtactgggggttagggcgtcaacacctaaatttggggaaacacaattcagctcattaaatgaatggaagtcatacctgaaatcaatgacggatcgtatgactacaaaaaaaggagacaaacattatacacctgctgtttaaagtatacaacacaaaattattgacaaatattaagctgaattaggtcaatcttctagatttaccaatttgcaaataatgcaatccacagagcaagatgtggatatgggggattcagacagcayaatctagctcgggaaactacagaaaaaaaaaatgacccattttgtgacatataattgaaggaacaaatgaagatagatgaatggagaacccrtaaataaagcaattcaagatacacatgaactcataaaacataggtcctaatttgagtaaagaaagaaaattttaatactgactggwtatttgatgacactgagaaactattctaactgtgcagctatgaaaaggaatgagatcatgtccttttcagggacgtggatgaagctggaagccattatcctcagcaaactaacacagaaacagaaaaccaaatgccacatgttctcacttataagtgggagctgaacaacgagaacacatggacacagaaaggggaacaacacacactggggccttccccggggtggagtgcagagagggagagcattaggaaaaataactaatgcatactgggcttaatacctgggtgatgggttgataagtgcagcaaaacacctttgcacacatttacctttgtaacaaacctgcacatcctgcacatgtacctgcacatgaactaaaaataaaaataaattattctaaatcttgggaagtatgataatggtgtcatgattatgttttaaaggacttcttaacttttagagatatataccagaatagaaataatattgtataatgtctgccatttgtttcaaatcaaatctgaccaaagtaggggcaagaaagagtaggcgcataaataaataactcattgataatgagttgataattgtttcagtaggatgatgaatatttgagtttataattttattctatttatatatttgaaaatttttatactgaaaagttgaaaaagctttatattggtattttaaactttgtaaatgtkcactaaaagaagatatgtctttttagttgttttgcctgagttatgatgagctttgatgagtcaatcaggctgcctcttgagttttccttgtaaggttaattgggtgcactggagagctagctgaggttaggagagcaggctctggttgaaggacagggtttcggcttggcagactaactaccttctctgattattaaactttgatgccacccacattagcacagtattctagtcacctgtgataacctgtccagaagttgctctgatcgtgttcagctcaataagtttagacttcacacaatagtgcttgtcattttttaccctcttgtaccaaatatatttcaaaatatgtccaatccagctgttaatttgactgaataaaatattataataacacttctgaggattgagatgatgtttgaagtttttcaagagtcttttccctctggattagagaacatctctgccagaatcaaaatgagtctcaaaattgacagtttttactttacttgctacagtaacctggcattttaaaaagcattctggaaaaaaaaaatgaatcttctgattgtgtaataaaagaataagaatagaaactaagataaaatgattctacatgtatatcttgacttatgtctatattttataatttcaacttttacgtcaaaaaattgtaaaatgtcactaattttataaggtttaatttaacagatcaaagctcataggactttgttgaaaacaatgaatgcaaatcctcagtacagttccaggtgtgtcatgagccctccaaaaatgatagttacaatgactgtttcaaaaaatttataccttcaacaaaactttaatcctatttttatatgcctgtctgctctgaaaataatttaatatgtttaaattcctagaataaatcttactttaaccaaattaataattcttaaacttaaatttagatttcaatgaatccccaaaatggtttccacataaagtaatgcagctaatatcagcactgctaacagattacacagaaaggtctattataatgattgagtaaatattcctgggaaatcaaccttgttaaatctatatcctataaggaaaggtgcatatctgttttttctagtaaagattccgtaattgttattacaagttaatcagcttctcccaggttcatttactctggattttattaatttattacaggaaattattgggtaagtaaaccacaattataataaaatctcatacattttattatatggttcacaaactttataaacacctgtgatgggattctgctattgatatttaagtggatatttattaaggaactagagatacttctcagtaagattagcttagagaacggtcctgtttttgatctcttaagattccaaatttttattccaaattttctgatattgcccaagtgtcttttctgaatctatgtctttattatttggcttaaaacctttgtgcatctggtgctctattctgctgtgactttggagaaaggttacagtttgtttttgctgggaggaataacttcttgaatgatgtcccaactgaaaattatttttttggttggatagaacatccctgtacaaaacttcctctattatcccttggataattcctgctgtatatagaggtccaagattgattaatgattttatcttcagtaacctgtgatctaaattaccattggcaagacaagagtgatacctgtttttttattctctacattaataaaacatgccttaagaaatctatatacttcatatagaggatatgatttgccactaagcaaactctatgaaaaagaattgtgttttcatagtaaggctttattataaaccaaatatgaccaactttcagctaaactgtattatctaatcaagtttattccgtcactttacttgctattatcaataagacaagtaatatatttaaatatagaataagtaacaagcaacatgttaactgaattaatatattggtaaaatatagattttaaaagttttttgaaaatatttgaggagggttgcacttttgctccctctgattttactacgtatgtctctgactgtatgtaatcacacctagcttatgctgtcccttccattctctacacttgactttagaaagtcaaacgtagactggagcaaaaaggggagagatcttttcctaccatttagcagattaaaaggtagattggaaatgcatctcagtatctcagccataaatgtctaagggataataatcccgctacatatttattaaactaattacaacatattgcgcaaaataaaatactttgaatcagaatgacttatgaatggtcgattgcatacaaaagtgctggagatatggtgataaaaagatgattcagccatcacaaagctcaaaattctactgggagaaacaggtaaagtgactgaagcccaggataatatttcaaataataagtacagtgagatacttatttgagagatgcaaactcaacaacagtttggtaagtactttctctattctaatttgaatacattctagtcaattgagatacacaaagcatcaattctccccattggatttggatcccataaaactacccatttccccaaatagatagtgttttaacttaacagacctcataaaaagcttgacactaaaatgagaatttataaattgtgatctgtagtaagttaaatggtgcccaaccctgcgaaaaacaaaaagtatgtccatgaactaatccctggaacatgtaaatgtgatcaaatagggaaaagatatctttgcagatataattgtaaagaatttcaagatgagatygttatggaatatctgagtgggctccaaatctaatggcaagtatctttattagagaaagacatacggggatttaaaacagaaaaggaagaggagacagccatgtgaaaatggagacagagattgaagttatgcagccacaggtcaaagaatgcttggaaccaagagaagctggaaaagacaatgaaagattttcccctagagcctttggatagagccctgcaaatactttgatttcatatctgtcctctggaacttggagagaataattttttgatgtttaagcagatgactttggggcagtttgttatggcagccattgaaagcaagtcgtgatctagtttgccttattttccaaagcatagataattttcaatttcaattaggaaaattgaaattccacaaaatgcaagtgcatacagaaatgtctatctgagttgcagttgggaaacattttgcatttaaaaaggaaaagttttaagatataaaagaaagtcttgagaaaacaagagaatatccctcatatatgtacaacttcttactaatagaagccttagatgtctgatcaatttcagaggcaaaggctaccattgactgttcattgaccattgacaagccatgtgtttcaatgatgaaataccacataacaaaatactctaaagcatattgtcttaaaacaactgttttattactaaggttcctgcggatctgatattcaggcaggattcagtggggatagcttacctctgttctacatggcgctcactgggatagttcaattagggtaagaggattgaagatggtatcatttgcatgtctggggctttggtcctggctgttggctgaggtgctttagttacccttttctctccacatagcctctaattactcaatattctaccccagcctttaaaaaaaattttattgtggtaaaatacacatataaaatataccatcttaaacattttaagtgtacagttcaatgataataagtacatttatattcctttgcatccatcatcacccatctattttcaaaactcctttcatcatgcaaaactgaaactctatacttagtaaacaatgattccccatttccctctctgtccagcccgtggcaactgctattctttctgtttctatgattttgaccatttcaagaaacttatgttaagtggaatcataaggtatttgttattttgtgactgattcatttcacttagcataatgtcctcaaggttcatccatgttgtagtatttctatcctttgtaaggctgactgataaggagagacttacttctgtcatttaaaaacttgttttctatatggcttatagcatttttgtcccttgcttcctgcgtgactgtcttcttttgtgtttagttgattattgtaatgaaatgtttatgtatctatgtcattgacttttgtatattttctatagctattacatttaacatcctacagttataacactcttatttagatttatgccagtttaactccaataatacacaaaactctctcttttacatttccatacccacttcttttggttgctgatgtcctaaaactacacctttacacattgcaggtccaaaaacaaaaactaataatttttaaatatatcagtttcttgaattaaaccattgttacaataatagtagcttttataattgtccatatacttacctttactgtgatatttatttcttyatatatgacttcaaattattgtatagtgtatttttatttccatcttcagaactcacattaacgtttcttccagacaagtctagtgttaacaaactcctctcaacttttgtatacctagaaatgccttaatgtctcccttagtttgaaggaaatttttgccagatataggattcttgcttgacaggtttattttctcttagcactttgtatatattggcccatttctttatggtttccaaaatttctgataagatatatgcttataattttatcaaaaatcccttgtatgtgattaatcacttctcttttgatgtttttgatattctcttttttgtcttcatcatttcaaaggttgataatgtggatctctgagctcattgtatttagagtttactgagcttcttaaatgtttatattcatattctttgttatatttgggagttttggccattatggcttcaaatatcctctcttcttttctctgtcttcttatggactccataatgcatctgtttgtccacttgatggtgtaccaatggttccttattctctgttcacttttctttaatcttttttctttctgttccttggattgataattcccatggtcttctctttacatttgctgagtctttcttctggctgcttaaatctacctttgaaaatctctggcaaatttttttcatttcacttgtactttttagctacaaaatttctttctacttttaagttttctatctctttatggacgtttataatttattcatgtattatttcttgatttcctctacttttcttttagttctttgagcatctttattacagttgttttattacagttgtccagtaggtcccccatcatgtctttttcagtgacagtttctgttggcttattttattttatttttaaatgagccattctttcctgtttctttggatgccttataatttttttttgttgaaaattagacatgtgactgtagtaatgtagtaactccggcaatcagattgtacttatttctcctaggttttcctaggagaaatttcctaggttttccccttttgttctaaatgttgtagactagactgtctctgtgcaaaggatcaatctgagatgtacgtaaatttaaggtcttctcaagtctcttttgagcctgcacctttccctgggcatacacagcaactttctaatttcccgtgtgtatgtggttgcttttaaatgtcttagtatttaatgtctacctccaaaaagaggaaaagagaaaaatgaaggtggcaagcaggcactggccatttaaatcccctggaaattacttcagccagaggggtaggggtgtgcaacaatggaggggaggtgcaacaacagtgactacctagcccttcgtctacaagtccgtgattagaagcagcagtaagcaatcagagcacagatctccaatatttggattataacattccttttgcccatgctggcttttgtgaactgcatgtaagttgctcctgaaacatattcatgnctgcctgccattggactaagggtcaggataggtagctgctactgttttaagagcttaaattgatcaaaagtaaccataattttccttataagctttccactggaagtttcaagccttcaatagactccagaactccagaatatttatatcagatagattctgccagtgcagttgttgcctacatggggagacagatttctggtgctttctattttgccagcttcccaaaatcttcctttctaatcttgtttctctccttgaaagctggggagaaccagctgtaattctaatttttgttgttagtggactatggctgtgagaaatgtcctctggatggggatgccactaccccctacacagctcacatctcactcacaactttggttttcccctgctctggaccagcctttttttatttctttatttctttttcacttgattggcttccaaaaatgagaagagaaaacctgtgagatctcttaagattcatgccaccaaatcatatgtcatcacttctgccacattttactggagaaaactcacagagcaaactcagattcaagaaaaggggctgtcttagaccttttgagcttctataataaaataccttagtttgggtaattcataaatagtagtaatttatttctcagagttctagaggctgagaagtcaaggcatcagcagattcaatacctggtgaaggcttgctctctgcttcgtagacggcacatcttgcagaaggggtgaacagtatcctcacatggccaaaggggaaggcaacttccttcagttcattttataagggagctaatcctattcatgagggaagaaccctcgtgaattaatcaccttcttaaatctttaatacaattgagttccaacatatgaattttggagcgcaacaatattagggaagtggactccatctcttgaaagaagaatggtatgtgtgcacagggataggaggaattatctgtggccatcttgcaggcagactaccacacagtgctctgctttttcttatcattttctttgatgacatctgatcctttctcacaaatatctcctttgtaaaacactcagcacttattatttatatcagtcatttgggaattagtcatatgctgcctagtggaatttgttgtcattaaaaattttttcctgttttgtcatttcaaaaacaatcacaaactcttggaggttaaagatgatgttctatatttccttgtaccccgtaaaaccagcatagtaggtatttaataaataactgtcttcttaattataaattttaagtggtgggagaatgatgtatttacactaatgcacggtggttgtattattatccactagattgtttcttgctgcatatcatgcactgcattatttcttgctgcatatcaatcacttagtactgacctcctttttaaaatacgcctgactttctcatgcttatcttacatatatggttatagctaagagttgtgaatggacacagatatgggaagcatatttaggaggattaacaaaagagtaattagaagaacacataaatccacaaggaaaaaatgactctttttgaagtatgctagcattttcaacatgcctgttgagttaatgatttatgggagtttcaattgtttaaatgtttggaatactctgcaataaaataaaaattctcttcaaagttgataaaaatactcagaggcatacttcctcatctgatgattcatagttaccaatgaaacccaagaactccatgcacattttcagcaagagcaaggcatctgatagcaagagagctggaaaggaagaatcatacagtgacctagacaagtgtcatgtcggtcttagcatcagataaactgattgcaatggttgattgtactatctctagcgagagtaatttagaaaacctgaataagaaaccctctcttgttcatcatagggatgactcttggtgtgaacccaatcatattaaacaattgtagaatcaccaagctagacattttatgagactaactgatttattcctcatcttgaaataaaacctgcatgccacaaaactcctctatgctgctgagacttagttctttctttgagaaaaataagagccatttattcatgcaataaattttcattgtgtgtgaattgtatactaggcctgttccatgtgcttgccatacgtcagtgaatagaagaggcaaagatctttgcctatggaacttgcagtctagtaggggacataagttatttcgtaagcttcccctttataaatatcattaatccttactaataataatacttacatcaatgtttatatattttacattggttttctgataatataaaaaaaaattcacaaaataaacccaaccactaataagctgtgagttttgagtgtagaattcttttcattaacaaaccatttcattttcagatcgagaaactaaggtttttaaaaaactgattttactgaaaataaaatctaaccacccatcctaatgttctttacttctttatctgtctttcaaaaatatcttcctttctctatgttgagttagatatgtattcacaaaatctaccatactgtccatatatgttagatataaatttttgagctcatgtgaaagaaaccaagtttgaatagttgaagcaaaacagaagggtttattattaaaaaaaaaatgtgttttctcaaggaccccaaaacacaaagctgaacttgagaagtgagcgctcaaaactattaaggctgtctgcatgacccttgctctaattcctctctgaaatagtgtctcattgattgaggtaaaaaatgacagcagtttctagagctacactgcctgtgttcaaatcctagctatgtcatttgttagctgagtagcctggaacaggtaaattaatccctctaattctcaatttccacatctgttaaaattagcataattataatcatatcaggataattctgacaggattatagcaaaaaaagattaaataatatctaatgactggcacaatacctgcctcataaatataagtcttcagtaaatataaaccaccattattaaataggagatgttaagaattgagctgagctggggagggctgagctgccagatgtgggagtattcagtaagacaacaagccaaaatgaaagtaacgattaagcttttattccacttactgtgatagtataatcaagagtccagaaagaaagtgccagcttcacctgtgtttcattttccctacaaatggcaccacgcaagggtcagatgcattagtacagttttggataactgtcttactgctcagggaaccccaaacaaaaagttcctatggttttatggacctaagggcaggagaagaagcaaggggaagatctaggaatgggaaagtaccaagtactaagtcagaatggagaaaagtgtcctccagggtacccactcctcccaacaagcaggtcttggcagaggctcctggaaaggttcatctcagagtccccagtaaagaagcctctgaatggaggctcctgggctaagaatgcaaatatgtataaaacatggctggccaggggtcctaagtccttgactgcaactcccgtcagacactgcagcacattgtctgtgcaagtcagtttggggagggaagctttcctctgtgaaggcctcccaggcaaagcctttgtattgcctagggcagggcaaaatcatacagaggtttttgacttggagctggattccttgagaggatttctaggagaaatcctcccaaaagtttcaacagtttatatttcatttgtatgttggtggttctctttcaagtgagatataatatagatgaaaagtatctaacatagattaggtattactcttattattactatagctatggttgcttgtatataactgttcagattatagctccaataaaacaacttattttattctctccagagttaggtaatatcattattcctcatactgaaggcttttgaaaaatgttccttggtctttactatacagagtttaacctttctgctctcaggaagaaagacagttggaaattcaccatctaaatttaaaagggggaaaaatctcagctgatagctggtaacacagtgttggctatgtattgagatacttacttaaagcatcatataagaaatgatgtacaggccaggcgcggtggctgatgcttgtaatcccagcactttgggaggccaaggtgggtggatcacctgaggtcaggagtttgagaccagcctggccaacacagtggaaccccatctctactaaaaatacaaaaattagccaggtatggtggtgtgtgcctgtaatcccaactactcggcaggctgaggcaagagaatcgcttgaacctgggaggccgaggccgaagtgagccgagataatgccactgcactccagtctgggcaacagagcaagactctgtctcaaaaaaaaaaaaaaaaagaaagaaatgatgtacaatcactttaatgtgtattaaggttcttgtttaaaaatcatctaaatttgtttagtatccaataaaaattgaagtctcactttgtgccaataattatgtatttaataaatgggaagaggaaacaaaacagtaatttttcttgaacacgtggaaatttatagataattgctgcaataaatattatcatacaaaatatatatttaaaaaacttaactacaatattactgtaaaagagaggaacatgattctatattacagtgatatgaggtagcctggggtgggggcaggagatcaaggagagtttaccccaaactacaggtgtttatattgagatctaaaggatgaggaaaaattactttactaattcattaaagaattgcaggtgtcttaagattgttccagtcaaggaaaactgtatattcaaaaccactgattctcacatttggctctactttggaatcatcttcataactttacacaatactgatgcctagatttcatgcccagattctgatttcattggcatggggtgtggctttggtgtcgggatctttttttataactcccctagcggttctgataagctttagtcagtgctttagaaacaatgtttaaattttcaaggtaggagggttatgccttactcaagaaaccgtaggaagactcatatgatttgaattcaaagaatgagagggaaggcattatgacatgaatygatgaatataaataataacaaatcatgcaaattctggtaggccacatccaaagtttggcctttatcttgagaatactggaaaactatggaaagactttaagcagatgttataatctcagaatttatgtttgcaaagaaagactgtaaagagaagctatgaaattagcttcggctaggatggtaggaaggaacgagttaaatagattcaggagacatttttaaagaggtgaaattggcagagctgggcaaaggattggatctgagaggtggtgagactgacagcttgatttttggctagtgggactgagctgatagtagggatagatagtgagcttaatcttagagatatctgagctccctttgaggtatctaagcagagacagtgaagtgatagtgaaatataaggagattgctgagcttgagatttttattgtttaggagtaaagatctaaattgcaatagagatgctttacactaaccttgtcagtttcataaaaattactttactggtacaaaacatggtaaaaggcactgtaatagacagaaaaatgattcagatggtacccatgaccttaagtggttaattatttaatggaggagataggaaagacagtgagaatttaatgtgattttaaaatgaacatcttaaaatgtctcaaggtagaatggaatagaagagaagaaaatccagcaacttttatcaggttgtaataattaaatgctaaaatattattagaaaaaataataatattgtgatctgatagaaaaggaaagctaatagaatttgagggaggggaatgaccccgaagaatcatgaaaactctcagggatacaacatcatattaggacacggtgtctagttggaaacattttggtttttcattcagcttgaactggagaaccaaaaagaaagaagaataaagaggacagcaggagttttaaatcatggatttgtttattcaaatctgccaygtaccaatacaacaatactatgataagagctaggagtacaactgtggacaaggtagtcatcattctggcacatagtttataggttcatatcatatttattataaaaaatagtttacttgagacaatatccctagttagctttcacaaaggaaaccagtcaaaataatgactttattaaaagaggttaagtagccattctatgagtttgcattccctgtgtgttgaagcaagtttttttttttcttttttttttctttttttgagacagtcttgctctgttgcctaggctggagtgcagtggcaccctcggctcacggcaacctccatctcccaggttcaagcaattctcccgcctcagccccccaagtagctgggattacaggcatgtgccaccacacctggctgatttttgtatttttagtagagacggggtttcaccatgttggccaggctggtcttgaactcctgaccttaggtgatctacccgccttggcctcccaaagtgttgggactacaggcgtgagccaccgcacccagcctgaagcaagttttagggcagtggttttcaaccttggctatacattggaattacctggaaaggcttttaaactactgatgccttggttatactcctggggattctgacttaattgtcctggggtttggatggagcatcagaattttttaaagctttccattctaatagtcaacaaaatattctaatagtcaacaaaagttgaaagccacagttttaagggcatgttttatcactcagactactaagtcacccgaaaaatgagactgagcaaggaacaaaagaattctgattatataggaaaaataataacaaacatttctttagtctcagtgtgtcatgaacacttctaaacacttaacatattttaaatcagttagtggtcccaaaaactgtatgaggaagtcacttttactattcgcatttgagagatgagaaaactgaaacccaacagcacacgcaaagtaagtgttagaacaggtacttgaactcaatcagtcttcttctagagcttcttatctgaactggtatgctatattgcctctaaatgtagtgtaatggtaattttataccagaagaattataaaagaaaggaaaacctataaaaataggatatcattaaatcagttaaatgctagttgataatagagtgattattatgactgcataaaacatctatgggttatacatatgtgtatatagacatatatatgtatatatttattcaaatatgtctatatatagatatatgtatacatatttgtatatatatgtgtgtgtatatatatgctggttctcatgttttcttcatttgtaggaatcagttaacaagttcttgttacatagtatgaaggttctgttttcagtagtgaaacagggagataaaagtggttgaaccatgtgattttttttctgacttttcaaagacattttctcctgaaggaagctcaagtgctaaggctattccacataatctcaagaacgactactactttatagtaatgaccaaactgtagtaatagaatcttaggagcatataatcatcctctagggaacacattttacaaattgaacctatcttgcaggtggaaataccataaagaaaatkatcattggagagattactggcacactgcattcattcacatgtcaaagtggaaaacattccaatttacttctataaaacatgtatctgagtcaacctgccatatgtattttttacactttctatccccttacagaatatctaccaaataaatgctgcacatttctaagtggctggcttttaagctgctttgcctatggctttttgttccctctttttctcagctgagaaatcaagtaaacaaaacattgtggctggtagcataggtcctcagtgcagtggatattttgtgtccggcagctggagcattggtcgtacagatgggcttcatttgttccatatgaatacaagttaataaatggagagaattccatttggtattcaattaagatctcccctgactcctgttattaaagcctacaaactattgagcataaaattaaaatcgagcagttcagctctttttgacattataacactgcctgaaaaataatgtaaaacccaagagtcacaagtcattccttacagcccatggcaaataagaagtggaaacattgaggaagaaagagtaaatatttaaaacttgatcattagtacacatgttaggagcaggctactgtgctcatgcaaatacatcaatccagtttgttgaacacaagatattacattaattttaacagaatgttacaagattattattgccaaagctccaatgaaggaaataattaaagcactaggcattttaaggtcttaaaatgacagaaaatactataggaaatcaataaccagaaaatactatagaaaatcaatatactgtaattgaaaggaaattgaattgggtttactttttttatcccgtctaaattttcttcagattgccagaccactgaagatagtgaatcttgttttgccatcagcagtgtgactttctctaagtctcatgtgctgcaagggccatctttattgttttttatttaggaagcactcagctgaatagacastatgagattttgtgtgtgtgttctctttactagtcttggactcattgttaaaaaaaacagaaacaaaatcaaagacacagcagacaaaaacaaccacctccacataaccagagaagtcaaattaatgagaattcagacatcgaaaccagaggacttgttagataagcctcacacttgaacctaagtgaaattcttctagtttttatcaaacactatgcctgtcattcttgctatgcaataagaaacattaccagttgcagatacaaattcaatttgaatctatatgaatctaactcattttcattgcttattattttaaaaagttattataatcaaacaaaaaagcttgaaatgaacctcagggaggtaagtggatatgaacagaaattaaagaatgttaaaatgagaaatccagactgggtgctgtggcttaaacctataatcccagcattttgggaggctgaggtgggagaatcccttgagcccaggagtataaaacaaaacacttaacaattctgagtctcaatgtcgttgactataaagtagaaatatcttcccttcctaccttaaatagatcacatttatgaaaaagattcataagttataaaacaacacctcaatgaaaaatgctgtatctggactttaaaaagaagtgaattaaatactaattttacctcttagtatatatgtgatcttaatgaagtccttagttttcttgtctgttaaataataatggtaagggcaccttctcatatggtcattgtgaagcttacatgtataaaaagctcagtaccatggctgacacatagaaagtatttaacagtgttcaaaaacataatcaatataggaaataagtattattttatttccttaataatttcttagttataccccattatcatatgtgataagagaatgtactttatttctagttttccagataatctgtatcctaaacattctttactcccaaattcagtctttgagcatcctaactcttgacatccacagctaatatttaggaaacattaaaatttgtttgtacatttgaaggaagaactaagtaaatggaacttaccaatcctaaaatccagactgctgttattaagaagaagaacaactgtacaaatgctgttaycaaaggatgtatgagtcaggcggaaaaaaaaggagaacacagaaaggtgaaaagtctttgtcaagcagaggagagaaattattgtcttgtaatatatatgagagagtctagccaaatattaaacatttttaaaatgaaaagaaatattatacatggtatgaataatatttaagtcattgcctaggttagaagattagatatatttacctattctacctacttcaaatgcttttttgctgtcattgtttggaacctccaaatactagaatgctttagaattataaaaccattgaccatgttcagttatgtttaaaagaaaacatcattctgaggaaactggaaattatatatttataaatgtttgtccatagcattgttgaaacaaatggctcaggtttcactgttaatccagttgctgatatttttgactactcaatacaccaaaatggtacagtcaagttggtgctaatagatgtcatttatttacacaaactgacaataggttcaccaaagttaagagacgaatttaagggggacagaaaagaaattcctgtgtgtgctttggcagcttagacatacttaccacgaacaagattatatcttaaaagctattcgttaagcttaaaattaagttatatggttgtaatatgtggagawagcacattggaatagctcttcacttaatgttatagatcactttttccaccaatattatttggtctaggaaagtaaaatcctcttgaggaagtaattagaaaaagcacacatcagggaatgtaattgaagatagacttttgttgacctcagaagagaaaagctcaaaagaaatttcgtaaagttttaaatatggcaagaggaccacaatgtctttgataattagactttcaacacatttggatttgctaattggatctaagttctaattaggctttttatgtaactaagaatgacatatcattgtatgaatttaatgtgcttttacagttgaaactaacaattagcagccttttccaaattattttaataaggaaaaagctggctctgctgtttatactgtgacattcccttctcttaagatatattatgtacattttcattttctwaattaaacaccttttggggagcttaaagggaaacttgggttttaataggaagcacctaaattgtttatttgtgggggagacttgccagccagtatgtagatgactttggaagctacagacaaaccgcaataaaaagaaataaatcacaatcatcaggaggaaacagcacaaataaccatttgcccctatgaccattcagttaatcaaaacagtctctgaatatgatgaaagatctgttacatttttaagtgtgcacatgcggaatatgttcccaaatgtgaaggctcatggatctgctttcaggatgaataataggaaatttcttctcaagatgtgcattacaacattctctctctctgtagccttgttctgtaaacagttatctgctaattcaagtcaaatcatctctttctttctccatatttttgattgagagtcatcaatttttatcccattcagatatatagacagtaatttaaaaactggtrgccctcagatttgtacattccaagagataagacctatataacagcataaaattaaactactatttgggtgagtaaagagcagtgagtcattgcaagactttaagggaaaggctgctgccaaaatattccaagcaaattgataacactgccaaaaaggcaaattatattgttttatgtgctatgaatactttgaaaacaaagacatacacatgatttttttcaaataaaagcagttgcccttctaaccatattaaaaatagtgtcttttttcccagtaaaagccatataagatcaaattaaaaccattgaaactattagagaatctaacttacagtaattgatatattaaaaaagacattatgttagagttatatgtgctattatttttccaattagtacattactgggactgagtgattggtgtatacataagtcctcattaagtaaaatgtcctcaatgagcctcctaaagcacattgggtactgtcatgtgccatataatgatatttaagagcaagaaatggcatatctaataacttcatttcctatttaaaaagaaaacctgtgcagtactctttccataccaattattctaagagctatcacatagttctccataaagactatacagaggtgatgggactgttcttcaggcagaaaaatgaccaaagttgtcttatctttcagcttggktgctggaatcctgtcacaggtctgaatgggtcactgactgacaagaaattggagaataacatgcgtggagtggttctacgtgtagtaactgttctggtaagtattatctgagcctcgtggttttgacttttggaggttactttatcctatatttctttctttattaactgatgacataatcttaaaagagattttaacaaattctaaatacgctttctaagattttttaatggtcatatttcacagccttcaatttacgtggatcaggatcacagttttgcagacttttaactacagtgtatgtgttaggaattttcttagaaattttaggctcaatttccatcctacagttttctacacatgacaaagtaaaggtatgtctcaggccttctttcattaaaactgtagtgaacatagatagtcaacatatagtgaacattgaaactataaatgaacataaccctgaccatgccaaacaatggtagatttggtaaaatgtacattctctaatagtgaaatattaacaaactaagaatctttttctcgtaagaacctacttcaaagggaagctgttgtttaataggcatctactgtcgactgtattccaggctcagtgctgattactgagaacattgacaaataaaatgacagatataattctgtcttgatagaacttatcatctagtgattctgtgaatgttgaataggattacagtagtttcccyttatctgtgggggatgcattccaagacccccagtggatgcctgaaactgtggatagttttgttttcttccaacacaatcacattgtgtagggcttataggttatagagtgtggatatgctggacaaagggatgagtcacatccagggcatgtcagtgggatggtgtgagatttcatcatgctacttagaacaatgttaaattcaaaacttataaattgtttatttctggaagttttcatttaatattttttggaccatggctgattgaggagtaaccgaaactggtgaaagagcaaccatggataagaagagtctactgtatacctgggaaagatctgttacaatttcatttacttattaaaaagtcaataaatggtaactgttataattctatacattatagttttctttcctaatagatacatacaataagatgttaatagaaatattcttaaacagtaaaatactcaaatgggctctgtctaaatagccataaaccacgaaggcatacattctcctttgctattccaatgtgtttaatcatgtgctagtttatagcctgtttcaaaacgtaatagtccatagttagtactttatttttcttcagaaaagtctacttgtttttaattttgaaaaagattttcctatgggctaggtaaattgcagaattagtaaataggagaggaagactttttgatacgttgatgctaattggatgttcatcaaattttataacaccagttgctgccctttgtacattgtttactacaaattaaatatatgcaatgtaattttattgtcaaaaaagtggatttgtgcatattttctatgaaaggacattcaagtgagtgacctattcttctttttttgtggcccataaattattcctagttattatttttaaaagggcttaattgcttttggtaaataattgtaagtatttcacaacttaaatgtgaattcgcttctgtatgtacctaagggtattgatatgcatttacattgatgcactaatattaaaaaagacagatatttaaagtacagcaaattattaatagtctttcctccagtgattagcatgaaaactccagtgatgattgcagtgaaagacggtatatgtgctttgttttcctttgagaaaagaaagcaaatctttaagtccaattaacctcagtcagttttaagcaaatagttatttcgcaattactatatgatagactcagtaatggatataagagaaataatatacagaccttgtcctcaaagtattcatagaatcttgttaggttgatgcacatagagaaaaacagctcagattgattaaatatggttgacccttggtgtctgtgaggcattggttccaggaaacccccacaccaaaatctgcaaattcttaagtttctgatataaaatgatatagtatttgcatataacctatgtacctcctctcatatgctttaaagcattttagattactcttaatacctaatacagtgtaaatgctatgtaagtagtggctctaccgaattatatatttatttttgttatttttattgggtttttttcctaatatttttgagcctcagtttgttgaatctatggagttgagtctagatgmagaacctgtggatatggagtgttaactgtacttactatgtgcaagctactctactaagtcttttgcatgtattgtcttattttgtcctcacaatattctcaagaaataggtaatattctgatctcaagaggaaactgagacatccagaagttgaaatacatacatgtatgtgtgtgtgtatatatatatatatatatcttatcattaagggaaggggttaaggtctagaatcagacttcctgaatttgaatcctaactctgctacttactatctgtataatgttcataaatacatgaacctagaagaaattgaagaataacatgcaaggagcgattctacgtgtggtaactgctctggtaagtattacctgagccttgtggttttacagacagtaagtagcagagttaggattcaaattcaggaagacagattctagacgttaaccccttccctcttaatgatacattatactgtctccagtcctactgtgataagtgtgagaactgaggtgtctatagaattttgtttgacttgagagttgaaaatgcttacgtctgaataaggtgaaagtgagttttattgggaaggattgtaggtacaatcatgttaaattcatttccaggctgaataaaacaattgctattttgttcatgaaatagtagcacttcacacagtgttaacacctgcataccccaggttcaccttcatgactcttaataatctctatttcctgcaagcttagccctgcacagatattgaatatggttttgtgactggagacatggaagcagtgtttttttttttttttttcaagtcttctatgatggacttatcagttgggtgccagttgagtaacaggttgttatacttattacattactacaatatacaatcattgtgtttaataattttgcatgcttcctatgtctttctgtaactactctgagaatggaaaccagtcattcccttcttatttattttctacaagtgccttttcaggtctagctcttagttatatggccttgcaagcttcttctactcaacactgagaaccactctcccctcaccccacccagcaactcccgaatcttgaggctttacctcactaaaccctgaaactaggatttaatctatactcaacttgatgttgtcacctaaacgcaacctcccacccccttatattccaagtatttacgtccaacactttccagaagagaaaagggaaaggaccaatgtgtacatgggaagaagctatttcctcctttcttctattgaaactgaaatctagtcttagctctacccactccctcttttcttaagaaattttatattatcaattacaccaggttaataaaatggatttttcttaccaaaattttgaaattcccattcttatgactgttgatattttattgacttgaaagaaataacttcatatttattttaaactacacaattcagcactctactgtttgtgatcccatgggcaaataagtggtgctctcaaacatttcattgaagagttaaatagaggtattattgacgaagatgtaaatagtgttaaaggaatcaacaaggagtgttgaatcaccagaacctacctagatgacttacatgaagactgataaggcatgggaggaagcattattactagacaaagcaatagagccatgggagagagaccatcactcatagtagtagtgagctacagtgcagaaaaagaaagagaatcactgccaataccaaaatcaggctatgaggaactgggaataagggatacactgatctcactcctcttatctatctcttttcatggtctccaactgcaaatccaaccagaagtcagaggttatgggagcctaagtaaggaagaccatgaaagttagtctttcaggacacagaggaaggcagtgaagccctcagtgaatccagaagaaaagtagagaaaaaccaacacgagcatctaccatttgataggacctattataagaaggttatatatattaacttatttaatccttataaaatttcatatgagtggcactaattacattataaggataaaaatagggtacataagagttaactaaatttctgcctccatatagctagcaggagccagacataaatttcaagatcagagatcctggttccacaaaccatgtccttagccactctgataatctkccttctgaatcagaatggactcatgttaggtataaatgaaatttgatataattattgagatgtgaggattgcatatgttggattgataacttaggagaattttcctaaatttcttcatatatagatttctttgtattcaaccatcaccaaagccacagaaatatgtcttagaaatggaggaaaagaaagaatgataataaaagcagtctctactacttggtgtctcttctaatctctttgtttccataatttgcccactgatctttacttcttaccaagtggtccaagtgtattactacaaaggaattatgaagattttcccgtttttaacttcctgagttatgcaatgtagatagcaataaatgaccaattaagtcattcaattgttttcatggtaattcatgaaaacactattggaaacattactgagttataaacataatcataatatatatgataataaaatggaaaggaattggttacaaattaaaagaaaggcgtgcgaagctatgctgcaacaagtataagatatctgagaaccataaattggcatttgggaggagctcactgattagtaattcttatttacctactttgattggccttaaaaaagacatatacattcctaataaacatacattcactcatgaattcacacaaaacagtcaaagatcctgactttagagagtttttttgttgtttgtttttattgagacaggctctcactccttcacccaggctggagtacagtggcatgatcatggctcactggagcttcaaactcctgggctcaagaaatcctcccacctcagcctcctgagtagctgggactacaggtgcatgccaccgtgcctgactaatttatttttcgtagagacaggggctcgctatgttgcccaagctggtcttgaactcctggcctcaagtaatcctcccaaagtattgggattacaggtatgagccaccgcacccatccagggagtttgattcttgcaagatatcttctaaagctctcaaaatagtcttgaaaaactgcagtgcagttgttctccattaaatacacaatagagcatttttttgcctagaattaccataaaaataattcaatatataaattgaattcatatataaatatatgactggaagtctatagtaaagactgtgatagtgatttttctgcattttataaattaaaaaacatagtttttcatattttaatctctctaaaattaggatgcatccttcaacttctatttgcaattgtaattagcaccatgtttgtctttattagtgatgtgtaaaatagttgcacatcttacaataggaaacattttagattaaataatgtatggtatttttacaaattaagttaatggatattcctggaaagttaagttaaacgtcactgggcaagaagccacataaagagaataactattttaaagaatacctccaaaagaaaaggcagtaggaaatataccaattagaaaacataggacagtaatagcaatgagaaaaattactgtctaaattaaaactgttgcctcaatcatagaaggatatacacagaaataggaaatacacagagatagcttatcttgaatcattaccacaaagcaatatccaaaatatctattgagagaatggtaggtttttctaagcaactcaccaaaggaaggattgtttgcctggctgcagcagacagccacctactgagttatcattttgagtaatttctttttcctaaaaaatatccatcattagtctcactttttggaatttctttttttttttttatggagattgtgactgatatatgggcaccagagtcttaatttgtacaaaaacaaaaaaaaagtatttaggttagatttagttatttatatacatcagcatgaagtaaagcaatgtacttaatttcctcttaatataccttttaacaaaggaataaataatatataattcattttttattcaaagtacttcacacaattttgttgcctttatttcaccaagtctcctctatttaatacacctatgctaagaagctttggcacacactgcaaaaagcactsaacttgcagtcaaaaggtatgacttttagtatcgtactagtttttctgcttaattgatctttgaatttatggaaaccaagacgctgttctgaacttcaatttttccatctgtaaaacaggaataataaaaccaatcacaaagggttactactatattaactggatgaaactatgtgaaagcaggtagcaaaatgaacagtgyttctacatacattatctctgcagtaaaactatgatgtgtaaactcagtaaagaaaaaaaagcatgagtgatcataaaagtctaattattcattgtcatcaaacttcagatttttgtgggagattggaggactctaagggagacaaacaaatgtaaactgcagaataatgagttttaggccccgtcactgttacctcaatttgaaaacctgctaatgaggaccacaggaactcttctgccagtgaagctggtacttcctagaggaaaaatgcacaaaaaacacctaccaccgaaaacaaaagcaccctgaattatgattttcaaaaatatctagaagtttatatatcaattatwttatctcatataaactgtgtttgattccaggctagctttaaatagactctatattttaatatataactaaacaaatgcctccagtgatagttctgaaacgtcattgtccttaaattttttgctaaggacattgtccaagtgtttgctacttagagactttcagaattttcatcgctacctcaaagttcaagcttttctgaggtcccagcgtttgagcctcttgaacctggaggcaaggttaggggttgggaaagtaaacttgtcaagagactctactgggcaagccctcacagcaaggagttgggaagagagctgacagcaagctctggtggctcccacagcaatgtcttacgagggctccttcggaggagttaataaataataaagtttggttcaggactccaggcaagaatgacaactctggctgaggaaatttccaggggctgatatctaaaataaacttaaagtcacaataaaatatgataagtgccatgtaataatcctacaatggaaatacacaggatagcattgtggttaagaacacagttcccacagtttcacttctggggtggcaaatgaggagttccatggacccactccccagcaaaataagcagagatgtcaaaaatgaaaaagaaatgaacaaaaaacaacactaacaaaaaagtttacattctctggaaataattgcaaatcatatatctcataagtgatatttagcatatacaaaaatattataactcagtatgaagaaatataaacaaaattaaaaaaaattaaaatgggcaaagatctgaacagttctgcaatgaagatatatttatataaatggtcagtaagcaaatgaagagatgctcagcatagttttccatcaaggaaatgcaaatcaaaaccacaatgagctatgactacaagcccactaggatggctatattcaaaatgacagataataacaaatgttggcaaggatgttgaaaaatcagaatgctgatacattgctggtaggaatgtaaaatggtacgactccttcagaaaacagtctagcagttcctcaaatggttaaaagtagagtcactacatgattacaaattccactgtatatataatcccaagagaaatgaaaacatatgtccatatgaaaacttgtactcaaatgytcatagcagcatggttgattgcagccaaaaatggaaacaacccaaaggtctatcaactggtgaatggatacataaaatgtagtataccataaaatggaatattatttggcaatagaatgaaattacatgttgataacagtgtgcagcatggatgaaccttgaaagcatgctaagggaaagaagycagacacagaggatcatgtattatatgaattcatttctgtgaaatgttcagaatagacaaatctatagggactcacaggggcaaaaagtaattcgtgattgcctaggtctgggaaagttttggagattggcagatgacagctaacaagagtggcatttttgagggggagctggtaataaagttctaaaactgactgcaatgatgattgcacatatttgcgaatatactaaagctattggattgtgcactttggatgggtgaattgtatattatrtaaattatatctgaataaagctactttttaaaaaagagagagtctggttccccagactgcctatgtttaaatccccacctctcctacctgtgaatgtaggccaggtatttaaactctatgattctgtttcttcatctgtacaatggagataatataaattacctacctcataaagctgttataaaaattcaaataactagtacatgcaaagaacaaagaccttctaacagaacctggcacatgaaaagtgtgatatgtgtccattcttcttatgcacagactgttaagggagagcatgaaaraagtatccaacttatgggtaaggcagtcggcaaggcttaaaggatgatatttaaattcatcttgaaagatgagcagggattatcaaggaatagataagagggaagggatatccagcattagaaagagtatatgcggaagtatgtagatatgatattctatcaagaatttaaagtatcctaaaagtaaattcaaatattttctgaagtatatgaaattgaaatacagaaaattccagcaacctatgtgtcatgtcttctcttttttaagagttcctttagagacaattcagtaagaaatttctctgtgactatgaaggtaatattgtatgatgtaaataatattcaccaagttaaaaataacattgctacaactctgatccagtgtaaagtttaggtaaaatagtactcatttttattattgaaacagtgtaatcagtagacatagctctgtgttgtgtacatattttgttttgtctcttcttctgagtgtactcatcttaggtgaatggggaaaatatgatttttataaacagactcttaaagaaaaatggcctatgcaaatgatgtaatttagagcaaccatagtatatgtgttcacttcagcgctcactaaataaaatcaccataagaattgatgcatgacaatggcttgacaatttcttattcttttgtatcacaccaattcttgaaatgatagctgttgcacagacatgtgtgagtattgctattgtatatgtggtagccatgcatgaccctacttttctcctcttggaagctggaacctgaattcttagactaatcaatgagtaaatatttcagagatgtgttatctaatttacttctgaaaaacagatctactacttgtctctagacatttagaaagagattgacagagtcatttgcaaattcaaagatataaaaacagtaggtagattgacttccataatcaaatcaatatttggttagaacatttcacaatattctaaccgaaattacatgaactacattatatactttcagaaatgcagtgtaccactccatctgaacaaaaacataatgttaaggtgtccttgaagctttaagtcatcttttggcaatgcagtagtttcaacataatcacaagacaaaaccagttccacataaaattcttcagaaatgaacatgaatataaataaaaacttgagagatgctactgaaatagattttacatttcagagttacaaaggaacacattagtagctattaaagcttacagataacattaccatctagcttactaataaatctcattgttagtattttctctagtctttactgaacctttaagattattaatttttttcatattttattgatatggctaggatagagttattaaataacttcttcaagttacaaatatgctaaaaataagcattgaatccttatctatctaatttactcccagccatgatgattctaacaaggactggcctaatttcctgccacaaaaggctataaaactgagccaagtatggaaaaaccttttcagacattagtcaattggtagaaatggactttgayacctaaaaggttggaaacaactaaatgatcccaacaattatcccagctttcttgctgctggcagtttccatactggagacatgaaagtatggatccaaaacagaacttgtcagcctcactgagtttacgaagtagagatcagagggtgagaaagctgatgtggttggcgcatattatctcatttttgagatatgttgtaaattagagggagctgagcaggaaaatatttacagaaatgtgaatcttgcctgagtactagaccatcaatgctagagagaaattctacaagtgtgggcaaagaatgacaggaatcagaacaatcgccagagctcacacatgatttttgagaaaggtttcatttggggagatcgtattgtatcaagaattcaaaagaaaatgtagaaagtatgtatttatctttgagttgtgtagtgatcgatagaaatttaggtgaatatctaaatatctatatagatataaagtaggatactcccacacaccttgctatttctgtgttttacatatttccctgacctcccaaaatgtccagytttttgttaggaagctgcacgctcatcttccccttctgagctccaagagcatgttgatgttcttgctgtttcatagctgatataaattagcattgggtaaacgacgaaaaaacgtcacagaaagtttttcttgttcacattttggaaatcttccttctcagtagagaaaagcaaccttaaagttgcaacatcatgattggatttcagttcacaaaagaaaataaattttgacaaatcacatatgcttttcctgtccctcccaaaatgctgcagtcttccatggcagccttaccaaagaaaaaactaagtccctaactggaasttggattctttcaaaggcacagtaagaggttttgaccaatagagaagcattgatcaaatcactatccactgcattacatggtactctaggagagtctgaaatgagaatagatatcttcaaaaagcatccaaatctggggctggtttactcatctgtcagcttctggaatagtgaacatgctattaaaattcagctccttctgggaggtgggaagataatcaaggggagacccaccatactgcatggaagtcccagaaatggaaaagctgatcaaaggaaggaaggtaatatacttttttataatatgttccttgggatttttaatgatcggtcgaaatacagaggttttggttttaaggtgttattttcacagcatctccaggtaaacttccaagtattatgttarcctggatagaaacaaaaaagtccataatgcttgaaactgaatatgtgatccttgcatcatgtttaaaattgttcagcaaggaatttcagtttctctaggtgatggaagttagcacgagcaaaggaactttacaatttttcagaattttttttttttcatgtttggaaggtctcctcctcctcctcctccttctcctcctcctcctcctcctcctcctcctcctcgtcctcctcctcctcctcctcatcctcctcgtcctcctcctcgtcctcctcctcttcctcctcctccttctcctcctcctcctcctcctccacctcctgcttctccttctcctccttcttcttcatttttatttttaaccattgctagtggtatgatttttgaattgggaaaacaaaatattcagactaaatattttcccaatgattcttatgtagagtaatgtactttgcaattcaattaaaaataacaagctaggatggtgttctgagccaaatgtaatctccaagaccatggtcagtaaagtactcaagaaaaaagtattgaggccgagtagtctgaagtctaytggggaataaagaagcagctgattagcatttgaaagcaaggtctttcactgttttaaaagtgaaggagaattttttaacagarcactcatcaaaaacaaagcgtttgaaaattacccctcctttgttttatcagtctcagggaagatgcacttcgayacacgtctcaggaattaagatgcatttcgatacatgtaatattacatttggtgacactgctggaacatatgctgagaaatgcaagaataaataggactaatgctcattttcnttttttttttaatcacttgcaagtgacatttgtttcatctaggcaggaaagcaggatcttataggcagggtaggtgtaagggctgattttaggtcaagcttttcaatttattatgcaataaaatatagcaataaaaatatgcatctttatattttccagtaaattataggaatctccgtttaattttttatatatgtgctaataattaattcagtactacagtctggatccacagtccttttgataagagctggcacagaggtcatttttatgtgccttattattaatcttaataatatgtagtaatattcctttatatgcttattgtgacacacagaaacttaaagcctttgtagctttaagttcagatgtctccacattcttttgtaaatccctgcagatttgtttcttgcttttaaatatcagcacctttctgctgtctactcttaggtctctgccctctatgcaggagatcttttcttttaagtttcccaccgtgcttcataataaaatcaaaagaaaaaggtacatccctcagaaagcattcatctcactakaaatagaaaacctgtcaccttattcttaaaaccttagatcagccaggccagtggctgaaatagtgagggtagtgtctacaaagggtatakagtaggggtagcaaaataattatgtaccttgttctctccacatcttttagggaagagactctttgctctggaaaatgacttaataccattgggaggaaaacatttcctctacccacttaggttcctatgtttaggggcctgtgaattaactgataatagacagattaacaggagaaaagaaaaggttaatctacacatgcatgtgaagtcactcaataatgagtcgtttcctgaatacccagaggtaaagattggtatagcaacttaaaaaagggaagggaagtgtggctagggcatcaatgtgtagttgatctccttcctggrattagcagaaagctcttggaggagagttaatagcagctgtattgggggtagtgtcagctttagttaggtaagggaaagtcagatcagatttcaaatattttcactttaatctttatgctaaaactgtgattccttcaatatgctgatgaaagttgaagtgtggcttggaaaaaaagagaaagtataagtagatttattctagatataaagcattttttaggtatagtagaaagagagaaagagaaagcaacaggcacacacacactgagagagagattttgacacgaccatgtcaaagactaagagtaccccaagttctttatcaaccatgtagtttctgcaacctgcagtatacacacatgcatacccatatactgatggaggcagtctaaattaatggttaagaatatgaacttcagcaccagagggcattggattcaaatttcaatctttcttactagctttgtaacttcaaacttttttcctcttggaagctggaaactgcatttttagattaaacaatgagtaaatatttcagagatgtgttatacagtttacttctgaaaacagatttattacttgtctctagaagtttagagagagatcgacagagtcatttgcaaattcaaagatataaaaaacaggtagactgactaccataatcaaatcaatattggtttagaaaatttcacaatattctaactcaagttatgtgaactatattatatacttttacattatttatctaccctcaagtttcagttctctcctttgcaaatgacaataacaataccaaaaaataaaaaaactaaatgaggtaatgaacgtaaagtgataaggatgatgacaggcataaagtaagctttttattgtttttatttgctttttcctgtagcctgaaaatatgttcaaggtaaaaaaaagcattcttttgctctgaatctcctttattctaccaattcttttctcgtgtaagtgtctcagactcttcagttgtcttcactttgtcatttatttttatcctcaaatcattgatatttggcttctattttcacttctccaaacaaattgcttttttgtcttcatgatcttctacgtgacaaattaaatgcatgctttcagaccttaccttcctggacctctcacctccattggaatccactggcaatttactcccagaagccctgtcctctcttgcatcttcaacatcttctgattctgacctctctattcctttgtttatttgtttgtttgtttgagacagagtttcactcttgttgccccaactggagagcaatggcatgatctaggctcactgcaacctccatctcctgggttcaagtgattctcctgcctcagtctcccaagtagctgggattacaggcatgcgccaacatgcctggctaattttgtatttttagtagagacagggttttgccatgttggtcaggctgatctcgaactcctgacctcaggtgatcctcccgccttggcctcccaaagtgctgggataacaggcgtgagccacagtgcccggcctctctattccttttacctccttcattggattctcttcttccagagtttcatccctggccttcactatactttattgaatgacttcatttactttctagaaagttataaacaaatttttatttccaaccctagcctctctctcctgcttcagactcattatccacgagtactattgaaaaaagtattctatatttaatgacaaaaaaacagaaaatatggaaaacaaaaattaacagcaaaatcataaataattcttccatcaaaagttacttgctaatattttagtgtctaccactagctaaacttaactacatttccttatctataaaatttgaggtaattgaggtcccaaactcataaaactattgagcatgaatacacaaaaagtttttaaagtacccagcacatactaagttccatatgaatatttgctgctattatttttttcaatttcaaacatgtacacacatgtttcaaattcaaaaatgtagctttgtacattttcttcccatttagcaatatgcaaatgagtatttttaattgaatagatttttttttttttgagacggagtcttactctatcactctgtcacataggctggagtgcaatgccgtggtcctagctcactgcaacctccgcctcccgggttcaagcgattctcccgcctcagcctccagagtagctgggactacaggtgcatgccactacacctggctaatttttgtagttttagtagagacgagtttcactatgttgtccaggctggtcttgaactcctgacctcgtgatctgcctgcctcggcctcccaaagtgctgggattacaggcatgagccaccgtgaccagctgtgaatagatatttttaacagatgtgatcagtagattttttcagccacttagtgaataatttctacagctgcctcaaatgtctattaatttatctagggttgtatgtaattcccagccttctaactgttgacagttttatttctcattccctgaactatgttgaaatgcaaattaatgtctttacagagatatttttgaatctctctattaaaaaaaaaaaaagaaaaaagaaaaaaacaaaccaatcccgaacttcaaaatgctattcttggttttttaaaaaatgacctatagtccaactctgtgtagataattatgtgacagggcattgagacactgaagttgacagcccaatgtgctgtgctgtgtcatacagatagacttaaaaaaaaaaagccccaggctgggttctgtggctcatgcctataactccagcatttggggatcacttgaggtcaagactttgagacaagcctgggcagcatagtaagacccatcccccccccccaaaaaaaaataccaggcataacagtgtgtgcctgtattcccagctactcaagagtttgaagcaggattgcttgagcccaggaggttgaggatgtaatgagccgtgattgtgccattgcacttcaacctgggcaagataacaagaccccatatcttaaagcaaaacaaaacccatctctgattgtagcgtatttaggttgttttcaacttcttcctagataacttgcaatgaacgttttaaaaatatatacttgtgcacatttatgctcatttatgattatttagatgtacaattattagatgagataatataaaaaatttacagcctttcacttttatttttctttttcttttattttactttaagttccaggatacatgtgtagaatgcgcaggtttgttacataggtatacatgtgccatgttagtttgctgcacctaccaacccgtcatctagggtttaagcaccacatgcattaggtatttgtcttaatgctctccctccccttgcctaccccactaacaggccccagtgtgtgatgttcccctccctgtgtccatgtgttcccattgttcaactcccacttatgagtgagaacatgaagtgtttggttgtctgttcatttgttagtttgctgagaatgatggcttccagcttcatccatgtccctgcaaaggacatgatctcattctttgctatggctgcacagtattccacgatgtgtaagtgccacattttctttattcagtatatcattgatgggcatttgggttggttccaagtctttgctattgtaaatagtgctgcagtaaacatctgtgtgtatgtgtctttatagtagaatgatttataatcctatgggtaaatacccagtaatgagattgctgggtcaaatggtatttctggttctagatccttgaggaatcgccacactgccttccacaatggttgaactaatttacactcccaccaacagtgtaaaagcgttcctatttcttcacagccttgccagcatctgctgtttcccagctttttagtaatcaccattctgactggtgtgagataatatctcattgtggttttgattcgcattgctctaatgatcagtgaatgttgagcttcttttcatatgtttattggtcacatatatgttttctttatagaagtgtctgttcatatcctttgcccacttttttatggggttgaggctttcacttttttattgtgaatttgttttctggaaaacttttaccaattttaattcacataagtagtgyatgagaaagtctactttctcacatgcttgckgataaatgttaacattcatttttatccttgccagtcagataagcaataaattaaatagttcttgttattttaatttgtattccccaaaggtatgttaagagagcaaaacaataaatrattcaccctcaatggttgctgttaaactttgtctttttaaaatttaagctttaaagattatgactttaattattttttcttctcataaataatatttctcttctaaataattctaagtcacaattatgtagggataaaaaagaaagtatacattttaatgctttcctccattaaatttgaatgtgtgttaattttgtattcagtgctgcaggtttttacagaatactgtctttggttccatattgaacattcaccttgaggactttagtctattgattgaaagctttagttcatctaatagaattattatgacacatactccarctaaaaatcagtcaaggacagtcccagaagttaatactcttccaaagactgatgcctccactgagcacctctaggaagtatgagatggkgttgcatcacttctcactaagttcttataaccccacatccaatatatcaacaaatttcatcagctctaccttcaaaaattacctagaatccaattatgtcttattaaatccattttactgccaagtcacttctgatttattgcaaaaggctcctaattgatctcccagcttcttcacttgcctcttccagtctattgtcaatagtaactgtcaactgtstagtaaactgtgaaaatatatctgatcatgtctctcctctgctcagagcccatctggcttcctatcttagtcaaagtaacagctgacatcatcatagtggcctaaagactctagtgaagctctgccccatccaaatacattgcctctcagatatttcctaatatstggctctagcttccttggtcctagccacgctagtgtctcttctgtctcttaaacaagtcagagactcttaactgctgtatttatacttactctttcttctgtctgaatgctgtttctacasaggtgctttctaattgaaggtacaatcatttctcacatatgccttcttctcattatttgtktaatttctcttcacagcacctatcatcaccatctgacattttatatatatatatatatatatttccttttttgtttgttgtctgtcactcccactaaaatgtaggtctagaagaatagaaatgttcgtttgttgtttgttttgttcactgctgtattcttagtgtgtgcctggcattaacactcttttgaatgactgaataaatatctgaatttctgctatttccctataagtaatattattttggatagaaatgccactaatcctgaaacattttcaagttttatatggtttttatctttaatatttgtgtggctttctgctacattccaatatttaattagctttagtttacatttattaaatgcttctatatccagataatgtcatatcataagtttcagttgacatttattaacattactacttcttataatattttaacagaaatatgattcatcaactccagtgtttgtaaatatcatcaccattctgaagtcaaatgttgccaaagtcttccattaaatacttgcagacttctctcatttggtacagccagtcactccttacagctgcaatatgttatatctcgaatgtatttcttgatagctttctttaagataactgcacttgcaaagttctttgtacctagaaaactttcaacaaatatttagagaatataatttactcatgcatgtggatagacacatgtaagattcacttaagtgtcaaatttactaatataatgaaaacttggaccaaacaagcaacaaaaaatattatccagcactcatactcaaaacgcagtctgagagtttggtatttttcagttcctaaaggttgatcatgtggttcataaaatcttagtctccaaaatgtattttcaaatgaatgtcaggcagaaccaacaaatgagaactagggtacttaggattattgtaattgcctaatgtgtttggtgaccttgtattcccacttacagcaacttatgcttctttcaaattcttttgtacaaaaaaaattgtcttgtccactctccacttagcctttaagtcactaagatgtggctatttcattagttgaaagcaatgtctaaaataaaatattttattttaaaaatcaatcatcttgcataataatagctttaactttatgctcaatttaaaatatttgtatttaaataattgcttacagaatagaaatagaaatgatatataagataatatagaagatgtaaggatttaagaagttaggatgacagtatttttatttacttttatcatttgtaattgtatcttattgtctggtaaaaacatttaaggaaagattaaaatctaagtttaatgtattatttataaacatttgctccttcataaaatcttcctgcaatccctctttttaaaaatgttttcattgcatatcccgatgatctgcttttcttctctccatgaaactcagatactagttttctttacaacacctggattgtttcttcctctmctgctgttccttattttgtttttctattctggtgtcttgatatctccttttaacaaattccataccattggccttcctaacttgtgaacatttctaatactcacatatgctctataaaaaaaagtgaggtttttccaagaagaacagtggccattaattctgcatatatcaaaatggaatgtgtcatctttgagcaaaatataagctcacaccatgcataaagacaactattgtttgcttcagccaggagtatgttttagggaaaaaatattttaaacaagccattaagaaatagtctcttttttctttaatgtctttgagctacatatgtgagcagaattataaagaatttccagtgactcattcttagttttggccttcctggcattctgtagtcgtgcatattaaaacctctaaacagctctcagtaaagccttggcagtagagcttgtagcttgtacctatcaaaaatgtcagatgcttttttccaacgccatcactagcaaacaatattacttagttattaacatataggaattaacggcaaaatctgcaagttgcaaacagtgttgtaaatcaactaagcatttatcatgagattttttaagtgactgaatacagattcagaatcatgaagttattatctaataacccaacaagtgatgtgaataaatccttgctaatatgaaaattatcagccactgaaacacccttttctacaagcaggtctgtggatcctcatgctaatgtacttagattgataaaccacagacattctctgaaagcttcgtttgttccagttgctgaggcttgtgcttagagcatctgtcatgcaaatgatcagcaaatcataacctgtaatttgttttcatttaataggcagacaggttttcaccaatttagactcaagtcctattaatactctttgaaactaattgctggaaaatgaattttaatgacaggattttatcatttattattttcccttctgtccctataaaggaagactcaaagccatctactcacactttgaaaatatatgttaaataggcacaagccataatctcctgtcatctgggctgttgcaaaggacccctaatcccctctcttgtaataatccattctacactctactcttaaaattactttcttactatcccatttcccttccacaaaatcttcaattccctgtcaagtaaatagcagacactttaatatggcttcgttgccctccattatctgtttgcagtttacatatttttatccttatttgatatcgcaatataacatgtatacagaaaaaagcatgamacattaattaataagtagtaaagtaacatccagaaaacactactcagagcaaaaagcagacgattgtcattaccacagaaaccacctccccagtgcatctttctgatcagacccttcccagcatcccagagtctaaccacccagagataatcacttcctctattttctttagattgtctccagctacgtgtgaattcttaaataatatggtcaatttacccatttttgaatgttatgtaaatggaatcaaaatctgctttctttggctattgcttttttcactcaaattattctcttaaacattcattcattttagggtacagcttcagttaacttcaattttaagctgtttagtattccactgcatcaatgtaccacaatatatttatcttttccatgttgatgggcacttggatttttagattgtttccacatttgagctattacagacaagggtgctatgagcattcttggatgtatagtttggtgcccagtattcttttgtattcatacctaaggagtggaatttctaggacttagccatgcatattcatactagataaatattgatgtaatacgtaaaaccaagtaatattaacttgtatataagtagctctgtatgctactagacaagtcaaaatatttttcaaaatggttgtaaatttatatatcgagcaggagtgaatgctattcactcctacttctatttcgacttctagaaataggagcacttctatttctttatatgcttgacagtacttgggattatcagactacctcactttctgttcctcctctatttattcttgctttaggattttctatcctcttgtttattcttccttcaccctggatattaattctgacctattgcaattcatgaattctttcttcatctgtttctaatctattaatgactcagtcatatgttaactttggtaattgtcttttctaattctcaaatttgtttagttctttttcaactgcgtaacaacactcctttgtagtttccagtttcctgccaattaaaaaagcattgcccttcatttcttcaaacacaataaacataatatttccaatatgcatctgaaaattctagtatctaaattcttgaggatcaatttctgttccttgtttcttctgcaggttctattattgaagaattattatgttggtgcaaaagtaactkaggtttctaccattacttttaatggcaaacaccacaattacttttacactaatctaatatttcttttcaccacatttctttgatttttgtttggacatcatattcaaaaattatttgaaggaatcatgttacacctaaagtaatattacctttttctagagaggattgtgtttttctctgtcaggaatctggagcctccatcagggtaccaccataaattgtgttaaaatttgagattaaactatgcagtcctggattttaatccataggtggaaaaaaatagagtttcaaagaggtaagcttcaattaagacagattatgatgcctccttcttctgtaacatattgtgtgactttgagttgagattcttcctaagttttctgatctattaaaaaagatatagctggtaatccccaaaatcatgattttccttttttttttttttttttttttacagtttctactgtatttctttgttgtcctgtcagtaccagttatggtgtgtgttgctttttctttctttatatttttgttgagcacagtgattgagtacatgccccactaatagggtataattattttgagagtaatatctatgacttaacaccatatctctcactatattgagtgtagtaccttgatgcagtagctagctgctcagtgaatgttaaatggataaatcaatgactgaataaattttagagataggtacatagataaaagtgatcaaaacaagctaagtattactgcagagaaggaacaagtatcttttctattatagttcccaaagcttcaaccaaatttcttttgctatgtttacctgtccaatatattggctggttgtactcatagagtactagtcttagttagaatttatgagtaatggtccaaatccgtaatagagcttaaaactaaagctttaaaaacattgatccagatgaagaatgataggatgcaatgaaagtttatttagggcataaaatttaaaaggtatgttatcaataattcattttgaaagtccccttaatatagccatttctattctgtatctttaaccagttataggtgacattgctaggaacagattttgacagcagacttgtgcaagggatctgtttgcctagagatttacttaaaaggtagaattaaagtcatttcaagaaagaaatttaacataagaaaatataaccatttagtacactaaataattggtctagctagttatgagttaaaaatgaaaaagaattaatagtttttagcaacatatacattgggacagtatttttgccacatctatcatttacctatgcaataattaaattcataattttttaagtgtcatatcgaagagtgttattcaacttcctggtgattaaattactgataaacatagccgattttttttggttttgcaggtcctgaaaaatagagaatgcatatgacttccaaatattggtagaagagccagtcaaataatatcttccatgaatcctcttacaattaatttgctgattgatagatgttcaaaatctagaaatgaatgagttgcatgtaaggaaatcagtacatgcttctgctgccatcatatatcacaatacaagcattaaaagctatattaattatagaactttatgatcttatttacatggtctgtgaatttgatctttattttggaattcctttaatccattctgattctaatcacctcaggaccaactttagtgtatttgtacaaggcgtaatcattggctagctctataagttgtccaaacaaccaaatgagatgtcgcaaattctgccaattgtgtaaagttttattatgtactttaaatatatgaatatttggaatatcaagatgtgttgtattttaccaataatattaaaggtttgcttgttcacttttcacttgtattatgatgtcatttaaacaagtcagtattattagaaatctgattcattctgaaaacctctcatctactgatctaatgatcttcaatattcattaacatgaaatattactataataggaaaaaaatcggtaccttaacaaaaaatatggaaatttatttgtttatttattatttttacttatttatttatttatttatttatttatttatttatgtttttgagacagtctcactctgttgcccaggctggagtgcaatggtgtgatcttggctcactgcaagctctgcctcccaggttcacgccattctccggctgcagcctcccaagtagctgggactacaggcgcctgccaccacacccagctacttttttgtatttttagtagagacggggtttcaccatgttagccaggatggtctcaatctcctgacctcgtgatccgcccacttcggtctcccaaagtgctgggatatttctttctttctttcttacattctagagccttggcgagttggcccaagtgttgtacagcattttcrgtgtcagggacatagacttctctcctttctctgctgtgtgtagtctcagatagttaccagagcaccagccattgtatgttctttctagttttcaggtagcagaaagaataagaaatgttgcacaaaccaccctgtttacatcacgttggccagaattagtcacatggccatgaagcaagccactttgcctgaagtaggactacagattgtctttattctccatagtggtaaaatataaaaaaatataattagagaagaagagaactcctctggaggacaactagcagtaacctactctactaactgtccatttactagttcattttgctctaagataacatataaacagtgaaactaaaatatgttttcaaaattagaaaatgtaagtaccttagataaccaagattaaagaaatgttacaaataccacaatatcaacatagttatagatgaacatcaaacttagtactgattttctgaatatccaaaatgaaaagaaatacctcaataattggttacattgttttttatcattttgaaaaaggcactactgaggcaaatgaagctctttgaccctgaacaattacaaaatttatctcatagcaatttttagggagaaaattgtatattatagttgacaatattcctataacaggtgcagtgattttataagctacttacagtgtctttgaataaaagccaaaatgaaagcattatgaaggctattttgtgaatctctgaggaaaaatcattcaaaaaaaaaaaaaaacctttggctattctggcttatatacaaggagaaattttagcctgcccagagggctggatggactacatacaccatgaatggttatctgtaaatattactgttgctgaaagatttctgaacaaatgtagaaaattaaggaatagattatctagttttctgtagtctgccagcatgtttcaaatcaatcgagctttcttaacaccaggtgttctcagaagtgaaaggggcctatttgttagctttaaaaagacaaaaatgggaaaagataaaagaggtggaagcagaaaccaatttgctaaatttactaaattagacagtttattgaaaaggtaagtgaatttctcatatcagtcataaagaagctatttttccaatgaaatgtgtgtttatatcaaagtcacaaaattacttagtgaataactcccagtaaatgcgatattattaatttcagctaaattatatgttcttagaatttttttatcttttcagattgttttatgtagattatagctgttaaaattttattggatgtaatttacatggtttacaaacaataaattcctgagaatagatacgataaatttatagtttgttgaatgatttattattaaggagtctcagattggtcctccgaggacaggaaaaataaattcatggaccctaagttttttagttacttttatctaatttttgatatggtaataattaaaagggagatgataagaaattgaatgattaagcattgttaaataatatgatgcgttaataatgcataagttatattcctgagttgattctttcaaagtataaaacaatttttagatttaatcaaaactctttaaagaattaatctttgcttttagggagcactatagattgacatcagaaatttctcttatttccatgtaggaagaaccttttgtgatggtctctgaaaatgtcttgggtaagccgaagaaataccagggcttctccattgatgttttggatgccttatctaactacctgggttttaactacgaaatttacgtagcaccggatcacaaatacggaagcccacaagaagatgggacatggaatggcttggtaggagaacttgtctttaaggtaagaattactttatttatttgtctcatacttaaaggttcaattatttgtctcatacctaaaggttcaacagtaacaccttgaagctgatttcatataaaataagtgtgatgtatttaggttggttaagcattaggtggtggaattgagtacaaaagtctcactcaatactattttatgaactttgtggaaagaaaagtagttgacaaaataaacctaaatgttaaaatatatcctgtaatagaaaagggtttagaagaagaccttttctttgctcaacttataccccaaaaacagaaagtgtatatgatacgtgatgaaatcacaatgtaagttacacatgcaatttgtactattttttttctttctttttttttttttttttttttttttttttgagacagagtctcactctgtcctccaggctggagtgcagtggctggatctcggctcactgcaagctccgcctcctaggttcgcgccattctcctgcctcagcctcccgagtagctggactacaggcgcccgcccccacgcccagctaatttttttgtatttttagtagagacggggtttcaccatgttagccaggatggactattgttttctttttaaaaatgtgatgttattggaaaaaattaaaacattcactgcttaraaactaatcatttcattctgtaatctaatcaagataggkatgtacatatgtatatatttttctttgttctttcaattctcagaaaggtgtttaaaacctctatgtcyttctttagtcctgtcagaatctgcttcagttttttgaggctctgttattaggcacatagacatttataattattacattttcctgataaattattgaatagttgggtttaggtttataacttactgtttggtttatatgtataccatttttttctctgttgcttcttttcctgtttttcttggggttaattaaatatatttcagtatttgattttattgctcttactgcctttttagttgtctccctttgtatttttgttcgtggttagtctaaaggtcataatatgccttcttaacttactacattctatcttaagttaatattgtactacttcacataaaaagtaataaattttcagcaatataattttatttgtactcactcctttttgatattgtgttcacatatttatattttattaacctcataccaaatatcatagttttttatttaaatatttattgtcttttaaaggtacagaaagaaaaaaaaaaagacagttgctgggatataatcacttatctaccgtgtctggggctctttattccttacatatatttgagctcccatttggtataatttaccttcaacctgaagaactttctttagagtgtcttgaagtgcagggctacgtaggtagcatatactctcaacttttgtttaccttgaaatgtcttttttaaccctcatttcaaaatgatattcttactggatatcaaactctgaatttacagggttttttaatgttcatcattttaaagttgtgattctatcagttttgccatatattatttctgatgagaaattagccatcatctgtatcctgattctttatatgtagtatatttttgtatgtgttagtggccattctacaagtttctcttcattttttggtgtttagaaatttaattatgatgttctagatatgattttctttgcatttattgtgctgagagttcactaaacttctgggataggttacatttagtaaatatagagaattatttcttcaattttttttaccttctttcctttctcttcttgatttgaggctcagagaatattcaagttagatcacttaatgttgtctcctaagtcactgaggccttgcttgttttattaagatatttttactccctgaccttcagatttgacaatttgtcttgatctgccttcaagtttactgatattctgccaccttcaaatttttgttaagtcctttcagtagctttttcattctagattgcttattttttctttccagaatttcaattttttgaaataatttttacttttctgctgagatttcctatctttttatcagttatgactttcttttcttaaaagttcatgatcacatttataatggcttctttaaagtccttgtttgctaaaatttcaacatcttatcatctcagaatacattgcattttcctggttcctcacatttctggttacatttgattatatattggacttcgtggttgatacattgttaagacttgggattatgtctctgaaattgtatattctgaaaaggattgatttttgcttcagtggatagttaaatcactatctgttctcttgaatttgtggagatttagctttaaacattgttaaggcaggtctatttgatgtaatcttggtccctagggcaaatcccttggttttcgtagtccacatatttctaagatataaccttctggagtttctggggaaagcctgtggttctcctcaagcccttctgacttaaaggaactcaaaattcaatctgtatcttccctgtcataggcaacagttgtaatcccctctttagcacgtttagccttctagccattactctttgctaattttcctaggatctctcccatatatgtgcagtttaggggtcagctaaggattttagaragtttatacacagattttggggctcactcctctgtggcatcctccttcttgtgtttcccttttcaatttctggcaaccctagctgattcaaactccatcctctgacaagttagttaataagactgactttctacttgagctctgtcgaccccatccccgctgaactgaagtgggtcctcaatgactaagcctaataaaggagggctctacccsgtgcagttattattttcaagggtaccctgcagtttctgcctgctttgggttgctctccagtcttttctatatatttttttcaatttgatcctgaatttttaatttttattctgatagggctagtccaataaaagctagtacatcattgctagaattggaataatttctcaaatgctttaaagtactcagaaggctagaggatctaacctaaattgtttgtaaggaatggagaagagtagaaataaaaggtttcttaaggcagtggtagggaaaataataaagctatttctatattctataaaatcctaatgaatttggtctatttaatacataagttacatatagaattgtattggaaagcattaatatcgttatttttaatacaaaatgggcaatcgtcagtcctcttccttcttattaaaaccgtgccccttcatcttctattcttttaaaagtcacaaattcagtgttccacctttatctttctaagggctgtttcctgatctgaacccagattagcaattacgttaaaattagtgtaaagaaaaggcattatacaaatttattctatatagatagtggttaaaatccttaatgagttattatgctaataaactacacttgctagatgcaaattaaacataaaaagcattcaaattagtatgttgatgttgtttttaatttgttttatgtgcttacactagttagtttaattttggagacttactttttcacctataaaaatgaggagtccaagtatgttaatggtaagatcacttccaaatactatgttttgaaaatataagtttatcgtatagcaatcatacacaagaaatagaatgttcttcataaacaatcaatttcaatgtaytatttgcatgtaagagcatgtcattattgtatgataatttatagtttagagggagtccttttgcaaataaaaaattgaggcttaaagaagcagacatatgatttttagacagaaaaaatataaaattattcattggaactaggtttttattttgttcaaccggatatttagtcactctgactaggcttcaggaaaactattaagcaggtggaggagaagaaacctacaaaaaagacttagttggagtagatagagagattaaaagaaaattgagaaaatgggttgtcatgaatgccaacagaaaataacatttcaagaaggaaagagcagtcaacattagaaaatgactatcaagttaagggtacacaacattcccttaactgtattctgactgttatcagtagagatgtaagttataatttttaacaattacaaatgttaattcaattacataatgatactttaataaaataccataaaataatttagctttccaagaaaattcatcatattcaaactttatgaggtgtatttacccctataaaccaaaattacaccgttgaaatggcataaaaatgttatgatggagctccagaaaagcaagcttattawtgttattatatcttctgataatatacatacttttgtgaatctaagtatattttaaataaatgttgccactaaatatctctgtacaagacagtaagaattttaaaattaacaggattaactcgtgtgcctttctaaggggctaccaaacttaaaagaatgtttcacatagtgcaattatatatatcataatgattatgcaygtaccatcacattaaagaagagtcaaagaagaaatgttggaaagtgagctctgaattcatatgattattccacagtgattagatctcatgttagagagctttctcattaaaaccagaagtcagtggtccagtacatacatacttttaagagaggaaaatgcagtcagagagagagagaaaatgattgatatgatgtacatatggagtctatttaaaaactaataatatagtaaagtctcctcaagtccttctctgcctcactactcttataattttctgcaattaatgtgttcttaaaatttatgaaaacacaaatctggccaaaagatatgaaacagataaatgagagatatcttctgcctagtacaggagaaatatttaagggtgagttaatgtaactgagaaattattttctcctagtttagaagggaagagaggcccacagagaactttcaataagaaataaaaagtatatcaagtttaggatagaagtaccaaaaaaattaaaaacaaagataactctgaattagatacagttggatgtttgatgatatagtttcttctttggctggctttcaagtcagaagcttttaaagtggagtatttaggggtattagaagactttccaagggcaagccagtatattcagcacagaaaaatttcaaggtgttgagtgacattttgaaatagaaactaaaaacttcctttttcatatattaatttgtttggaaaagatttctataaagtaaaaaaatacagaaattaaatcttaatgctaaactctacctcatttaaaccataattagtactgacccatggatatctaaattatttttttaaaaggctctatccataacattgtaagctgcatttgtagtaaaacttcatttttatagacactgaatccatagatcgtatactaatygaatcatgactcaattcagaaaaaaagattttatacctaaaactttatagtcactggttatttaaaaaggattgtaattttaatttgtatgcatatttttgatgcaaaaatactttggtgatcaagaaaagactttcaaacacacatttctattgtacttgaattacaattgtgtgaggktggggcggaatataaatatagttcaagcataaaataaaatgatataaatattctacctattaaagcatgaggtcaaatcactatgatatttagattctaacagatatatttttaaaagtgacttgacaatattattttaagttatcaatatttacaacacaatatacatatgtcagtgccgacgcccactcaggaaaatgaaaaccattcctaaaattttgaaaagaggagaatttaatattgtgggttgatcacaaaggcgctagaaggaatcaaagagcaaaggatgaacagagtaggacattggaaaagcaaaaagaaaaagtaaaacacagatatcaagtgttactgatgtgtcagttgattgtatctgccagacgtatgccccttgatcagacctggaattgccaaaaagttgctgcccgtgccctagctgctgggatcaagaatcgcctactgccactgctgctgcagccactgaaataaccatttaaagcagacggctcttctctttctttttctgtctgatatcttcagtggtttccctcaggtggaaattatggagaagccagatggcaaaggagcctgggaaatctggtttgcagattcccatccctataaggctcacagtatatagcagagtagaaaatggtatgtataggtttaagagaaaacaggtaatgatcagtactgtctgcaaattgcgccctttacaattttctaaatgattgcaaaattaatatgtcaattataaatgtagaaagatacatacttaaaaaattcctttggggtttatatgaagaaaaaagcttgatggttattacaatggaagatttattttatataaagaacwtgactggtcgttttggatttaaaaataatctgttccttcagcctaattttacctgagcgtttccaccacctggaaattaaatctcttcatgctaactgattatcaaatrctaaattatatgacaagaattttactccccaaggaaaatagatccaacaatggaagaaagccagaacccaggaaaatggaaaaaaaggaggaataagtggactaaattataaatctgtaaaattaggataaagtactatacttagcatgtaagtattaatagtgatgtttccatgttaaaatatagcaccattgagagtcctatctctcaatttctaaacttctagtataacactaggcttttcttgtcactgtgcccacccacgtggtttcatgagagtaaagaatgtttttgaaagtagacatataatattggagtataataagatactatttagtaattataatgccaataatgtcattttctgagaaagaaaatgctcccaagactaaacagagtaaatcagctgcttgggactacacagctttcctaatttttatggttgacacaaagtttggcaattctttagttttactaggtaaatgaattcctatgatgggtattttagttcatcaatgcattaacaatagaaagcatatatttaccgggaggctttataaatattttattttattattttatttatttatttagagatggagtcccactctgttgcccaggctggagttcagtggcgcaatctcggcttgctgcaacctccgcctcctgggttcaagcgactctcctgcctcagcctcccaagtagctgtgattacacgcacccaccaccatacccggctaatttttgtatttttagtagagacagagtttcgccatgttggccaggatggtcctgaactcctgacctcaggtgatctgcccgcctcagcatcctaaactgctagaattactggcatgagccactgcgccctgcctataaatatttcaaaacatatgccacttaacatgtgttaatcacatgccatggtcaaagtgctatggagggatgcaagtgtgaataagacatagacattgatcatgaaaacattttgttgatggtctctatgtgctatgcactgtgctaggcactggagatacaaagataaataaaacatggttcttgcccttgaagagatcttgtcttaatgagaaacacagaggttaaactagacacttataatacaatgcactaggtgcaatgatagagaagcactaagaaagcaacaaggaaggtagagtaaaggtaaatttcctgaaggaggagaaatatagcctgatgacaaaataacaggtagtaattatctaggtaaagagggattggcagaaagtgaaggacgtctactgacagacacaagagtagaagtaaaggtagaaaggttagaaacagcatggaaagcaggccaaaatttatgagaattttgcagctctccaagcaaaaagtgatgagaatctatcctaccatactaatgttgtgaagagaatgaaagacaggaaatcagagataaaaaggaggtaggataaacagaatttattggctaaagtgaggagaagggagaagtctggaataattcatcagttcatagtacaaatacataaaagggtggttgtgtaactaattgggacagagattgctgaaaaagatttagaggaggaggacagtttagaatagggtgagttggatatgtagcattctgaagctcactgtgaaagtgccataggaggtatacatttgggagtcagcaacctgtgggtggtagttgaaatcatgaaagtacatcagattgccaaaaagaacacatggagtaagaggatcactgggctaatcttaggatgaaacccagagaaagctgtcacttaagaattgacaaaataagaagaatttatgaaaaaaaataagaaagtttcaaaaaataagctatgactagcaatgtcagaactatttgagatgttgatgataagaactgccaaatgttcactagattggccatttgggagttgttggttacccaagccagaactcttttggtagcatagtgggagaaaaagccagactgcaaaagatgatggaaaaacttggatgtgaaaaggtgaaaatgacatgcatatgtattattttttcagaaattttagatggagaggggaagaaagagataataattggaagggtcattggttttggtagagtttttgtttgtttttaagttaaaacagagacttgagtaaaattataagctaaggaagaaaaagaaagaaggaaaatgtaatataagaaagtcagttaatatgtgaaggataaatatcctggaacagattcaactccatcaaaaatgattaaactgaaaattgattttaatgaggtaaagatgttactttgatactgaatataatataatgagaatgtgtatgttaataatagataggcaagagaatggaaaattgacaaagatactttcttattccttcaaatttattgataaaaattggagattacgtatgttgacagtgatggggacatgtattatgtaacagtctacaggagagtggtgaagattgaaatagacattgaggaaagggaaagtgactgctaaatcagaacagataaaagaatagatcagtggcactaaagactgagtggaggtttatatgaaactgacacttttttattgctgctagtttacacaacagtgtgactttcttcagctgagattgagtgcccaagtctaggagcagagatgaaaatgttcatatcaaggttgagacatggtggataaacttggtaagggaattaaatgagatgaaagaagagctaaaatgattaaggaagcatagccatgatcagagacataaacttggataaaattttggaaatgttaattagaagatcaaatgaagttgaaaaacaggtgaagtatgagtgaagaaatgaaagagtaggttagaaagacataaccagagactgaaatacgaaagttctagaatttgaccttgaggttcatggcagagtgttagagaaaacaaaagaaatgagtttaaaatagctcaaaatggagtgagggagggagggatgaatagatgaagcataggggattttcagggcaataaaactattttggatgatactctaatgatggatacactgctgacattatacacttgtcaaaacccatagaaagaatgaactctaatgtaaactgtacaccctagttaataatcatgtattgatattggttcattggccaggcaaggtggctcatgcctgtaatcccaacactttgggaggccaagatgggaggatcccttgaggccaggagtttgacaccaatctgagcaacatagagagacctccacctctaaaaaaataaacattaaaaaaaattagctagacatggtggtgcatggctctagtccgagctgttgaggaggctgaggtgggaggatccctttagctcaagagtttgaggctgcagtgagctgtgatagcaccaccgcactctagcctggatgacagagtgagatccgtctccaataatgattgtaaggttcattaactgtaacaaatgtacctcaccaatgcaacatagtaataatagggtaaattattcacactttctgctcaatttttctgaaaacctaaaactgctttagaaaataatatctatctgaatcatgacccaaaatgattgttgtaaggaatatctacattgattctgaaatatattaggaggttggtcagtttttgtgtgaagagaaacatttagccaggtctcaaagttttcagagaaggagaagaagatgctattgtgaggtttgtctggtggaggtgatgagacctcagaaagcacatgtaattgacaacataaaacaaaacaaaacaagaatggagatagcatgaatagagtctcattaataaataacaaaaaacaggttccttgagtatctaagaaaggcaaaattccatggccyctaataaatagtgaaaatgatggaagagaattcccacgccatgtcagctcaaaacaagtatattttttgcccaagccatgctcaagctcttgctctttttctatgcctcctgtgctcatccccactcctattgtctaggatcccgcacactgggttattgatgtagctagtcatgacacttggctgatggagttcatttcaataccctagtagctaatgtcaatagaactttcattgattttccagtgtcctttaattcgttaggtattgaccttttatttaaatcccacatgaccattccaaacattttccacacttttcaagcctcaatttctagtcccttcattttttacaccctcgtcatgttcagttgttaaactctatggtttactgcaaaagctgtgagaatctagcgtaagtcccttgtgttcttgatattcaacctcaaaatccttccatgattctctcatctttagtgacatcaaaggcattagttatggatactgttgacacatttaatacccatgtgagcctaaaagagttttgaatcctctctgagtcacaatgtccacatcagtggaatgaagctattgtgaagatgaaccaagaaaatgaattcaagaatgtgttgcaggaaaaacaaatagatcttgttgtatttgttgactcggatagattggtaaaacttcctcaggttctgtgttttaaaaatgtaacagatccaacacatatttggaaggtagtctgataggatttgctgtggggaagtgagagaaagaccaaagccgagaataatggtttccagcttcatccatgtccctaaggagatatacctaatgtaaatgtcgagttaatggttgcagcacaccaacatggcacatgtatacatatgtaacaaacctgcacattgtgcacatgtaccctagaacttaaagtataataaaaatatataaaaaaaatttaaaaaagaccaaagccaacaatctcttctaaactcatccctttttaattttgtcttttcagccacagcagcagaaaacaaaaacaaaaacaaaaaaaaacagcctttatttccattttccccagctccactcactatcttgttcctagccacaattatctcttctctggattgtagcygtagaggtccaattactctccctttccactcttgactgccttcaatatattttaacacagcagccagagtgatccagtcattttcctgctagaagacttttgatgggtttccatcccactcagagtaaaaactgtccttaaaattgtctacataatctgcccaatcaattccctttgtgatctctttatctctccctctgtcaccatgctccaagcttatggtaccccttgtacttccttatactcattgaacttggccttttcaatttctgtctctcctatctgcctaaaatgatatttctctgtccacctcatttttttttcagcatttgcttaaagcttattagagaggactgccattgccaccctcttcaaaagaacaacttccatcctttgtactacctatctctcttattctgttttattgttttttataacacttacaattattttattatgtactgacttgttcatttgtcttcctctggtaaaatgtaagctgaagttggtctgagatttcatatatttggtttactactgaagcctcaatatctagaaaatatttgtacataaaagaatgaatggtggccacatggcatacattaggtaataacactcccctaattaataaccattcaatgggatctcattgctctttaataaaatcaattaacctactatagcctactaaatttggactttatataaaatgtttttatctttgttgaaagactacactttgagcttttgttcctattattttaaatattttgtccattaattaaacagcttgttatattcagctactctcactttacttcaagttaattgagaatggtaccatttattggcacagaagaaatgaatgaaggaaatatttggccaggagttgcagaatgcggaatcaaaactactattttagaaatcagtaataatacccagatgctattctaaagctttacaggtattgactccttacatgctcttactaatttgatgaaatagatagttaatatgcccattatgtagatttaagacatcaaggcttagagaatttaaataccttgctcaaggtcacatagccaataactggaagaaccaggatattagcttaaattgtttgattccattctcttaacaactatggatatacctctttggagctatccaaatggaaaatgaaataagtaatctgatatatgagtctggagttckggtaaggatatggaatggacacatgcatttgaggccagtctgcatatagatgaagtttaaattgcccctctacctttctttatccctacttctcttttattttcagtctctttcaaattctttgctccttccccatttcttaaaaaaggtattctctatcttgaaaataacctgctcatgtattctaagctaaattaattaggtgtctttggttgcaaatgacaatccaattgaagtgaaaagataatttaattctcacaaaactggcctattcagggatgagatccaggctcctttcatcaggctttggtatcgcttgctccatctctcagctgtgatttttttgtgtgtgtgttgccccagttctcaggcaggctctcctctcttggcagtaaagtgacttttagtagctcttaggcttagatttcatcctcttatctatcccaacataaacatagattctcttttacctgcagttccaatacagagcctcagctttaacattcactggctctgactatgaagtattgtgttcaagaggaggcagtgttctcaatgccaggcctacaccacttgcccaggtggagcactgagagtaggggtagctacacgcaaaacacctagagcaagcctcggggagtagtgaatcccaaggaaaagtaggatgctgttatcagaggaaggggaagtagataccaaacaggaaaaacaaaagatatccttcaggggcttaaaaacaatagaataagttacaggaaactatcaatagttacatgtacacaaaaatttaaatcgacagtaatacaaaatcataatgaactaaattaaactacaaacaaaatgctagaaaatatttgtaaaagtgtaatggtgacttgtttgtgtcaccgcttcactgctacatgaagtaaaaatcaacaagaaaatactaagaccccactggatagatataaaagatatgaacttagagtttcaaaaggagaaactagtaggcagtataaatccgaaagcaaatatattgcaatggagaagggcagttaatcattttttagaaagttaagtttatgaaatatgattgatatatattttattttacaaaataatgtaaatgtgttatatatgcttggaattattttatatgttgtatttcataataaagtagaacatcaccagaatttgatgacatacttgtcatcaataatagatttgacaacactgcaattaacacaaaacccacaaggaatttaaaagcatagcttgaaactgaccaaataacaactatactagcactgatatagagcttacttattcctgacacagtctcacatactatgtatttattacctctcagtactcacaatgataagtactactattatctcaatgttgtagatgatgaaacagagagaggtgaagtaacttgcccatagtcacatagccaagttgtagagaattaattattcaaattcaggaagtttggctccagcatccaagtgcttaactcctttaccagtttccagagaaaaacagttttgtctgcaaagcatttaaataaacccagttacatgtcagtgagaaaaacaatactcaaacagttcagagctgtttttttttaaacctgcatatttgaagaaggttcagataggagttcagacagagtatgagtagaagacaaaacataagattacatagagaaagatwtggggtgagatgtaaaagatttgcatttctaaacttctcgaaattcacacttctttctcaaacacctgtgtcttctttccataaaaaattaaaacttttagaaaggactgcaatatactgtacagtctatatctcacttccctcttgcatttaatcacactccatttagatgacattcagctttaatctgcctagactgcctgtactcacttcatttctcaaccctagctaaacttgcactttgtcccataaggctttcaaactactcccatctcttagtaatctcgtcctctgagaacacctattccacttcttttcaaattacctttgtgtaatgttacacatctatctatatatatctacatctatatctataaatgggcatatatacaatctcaggaagagagaacgagagagatggagggagagagagaccttctttttgcatagtccctgttttggaaatcagaagactaaggttatgtttactttgtatgccaagcacacagcagaatgccctaaattcatccatttatctgcacatgtttttgaatgcatgttgtattctgggcactgtgcctggcatcatagatacaaaggagtggaagatacttttcctcggccttcaaagatctctaagtgcacacgaaaaacaaatgtgtagataaataattaaaacacagtgtgaaaaatgccatagggtaatacatacagggtgccatggcaacccaggggccgaatggcagcttctgcctggggagttgaaaagatttcacagaagaggagaaatttaagctaggtcttcagatgagtaggagtataagaggcaacaatagggataattataaaagcatgtttgccttgataaatagtttgcactttatcatttagccagtacaaattataaaagagttttacaaaagagaaaaatgtgatttaacttacgtttaagaaagatagctgaggtaggcctgagaatgcattggagtgagraagagaaaaaaacaaatggctttttcaacaatctagggaggaataatggaatgtctacattaaaacaacagtaacaggagactaacaaaaagaatgagtctgaggaaagttaatattctttattttattttattattattatactttaagttttagggtacatgtgcacaatgtgcaagtttgttacatatgtatacatgtgccatgttggtgtgctgcacccattaacttgtcatttagcattaggtatatctcctaatgctatccctccccccatcccccaccccacaayagtccccggagtgtgatgttccccttcccgtgtccatgtgttctcattgttcaattcccacctatgagtgagaatatgcggtgtttggttttttgtccttgtgatagtttgctgagaatgatggtttccactttcattcatgtccctacaaaggacatgaattcatcattttttatggctgcatagtattccatggtgtatatgtgccacattttcttaatccagtctatcgttgttggacatttgggttggttccaagtctttgctattgtgaagagtgcagctataaacatatgtgtgcatgtgtctttatagcagcatgatttacaatcctttgggtatatacccagtaatgtgatggctgggtcaaatggtatttctagttctagatccctgaggaatcgccacactgacttccacattctatggcataataatagaaattgataacttggaggagaaaagaaggaagggttgagacttggtgagaaatttagcagaggaaaatgagcagatggacactccacaacaaaaataggggatgcagaaggaaaagcagattggaaaagggcaacagggacacasaatttggctataggcattttgattttgtggtacctgaggaacattctcatggaattgtctaggaacaattagtcagtgagcatctggaacccaagtgaataatgttgagaatttctaaaagtttaggaaacataggtatttccatcacttccattataaaaacttcattgggaatgttggattaataggaagatcatgcacagaatgattatttaaggtcctaaattgttccacctgagcatgggtaaggagaacaggtgttaattatttttgctgcgaggggaaataatttaaaaactagagggaggagagggttaactttgggaagagagttcagagaacctgagaatgtgatgagttgtccccttttccacccacactggagaggggcatgccaggggcagttgggaaggatcaggcattcttcccataaagtcgagcctatctctctatgccagcagaacatgctgcagggaggcacaattcccaccattctgacccaccatttcctaggtagtcaaacttagggtggcaagaacacctaagattcccacagtctagagaaggaggaagagctggcaaggacaaagaccagaggaaatggcctccttgtgcagggagagcccaccacccactgggatcaggagaaggtcctgttatgaggagcaacgcttgtgaatgaagaagggttctcagctgggtgcctgaaagccatcaaaaatgttccatgatcacacaaaagagtcttacatattttcattactgcaaaccagccttgaaaatatatgtatgggccaagaaaactttgcccaccgaagaagaacctccctgctacaacacacctgccagtgactgcccagtgataaatgcttgcaggccttgtgaaatgaggagatagctttgcaaaggggaccagagtaaaatacgtaaaaagaagggaagcccttatagagactttaaattggacagtggctaagactttcattcttacatgagattaaacaagtaataatagacagattgagtttcccagagtatgtcagctgtacacaggcaggaagttaaaaaaaatacatgtggtcataagaatacatgtttgcacgtctgaatggtaagtgttcaaaatccactggatatgcatataggatgaaactaaaatatagatatgggagatcatacaacctgtttgtatataagtacaagaggaaaacatggccaaaaatatttgttgttgataaggaaggattttaacactaatgaaggaaaaggataacgagagatctgtgaaaggaaataaattatgtagatgcaaatgacttagtgaatggctgtaggagcaattttctaaatttgcaggtgatatttaattggcagacattgcaaacagcaaggagcaattcaatcagataaagaacttgaatcattaagtacttggcctaatagatggcaagcgcagataagtggtgaataataagtcttgaatcaaaactaaagaacagagagtgaacatttgccaaagggaatgataccatccaggaatggctcttagatttaaggagaacttatagacaaggacaaacaaaacttcagtaaaatattacaaataaaaagatttggtgggttacagcttatccagctgaagctgtgatgagaaaatctgacaacttaaggatagataaatcctgaaatccacggttggctattgaaattccatttgttacctagaatttcatctatccctgatcatggtttggagataaaattaatgagtaagataacatccaagcatataagaggttacagatttgggtgaggatactataaataacttttaaagacatttcggatatgaaattctctatgttctatgggcataattgtgaggtattgtgtttagattgcttggtcatttttatttaacatgccagttctagtctacgttagtctggaaattataaacatagagaaatatgctacaagtaaaagagaataataaaaatttattatagcctagaaaggtagttgatgcaatatataatatatttcctctttctctktttttgcaatggtgaatactttactaaatgaaaaggttaattttaatattaaagagaaatggaaacatcctttagtacaacattaaaaccacaaatggaacctttaaatattcactcactctagcaatcaatgttccaacctcatttaaaggattttttttaacttgacatacaaatattcagaatgaatatttggaagcagagccacgagccataccttgaaagataactgcggacttactcttgcctgccatttggrtacttcagatttcagttgttctaagtctcaatgatcctgagttttctttttgtaatttggtaattttgtaatggcaggctttaaaataagtaaaggttttcttaactaagaacaaaaaaaaatccggagacctaacaaggctcagctgtgtccaggtaggagatgactgcagtttggcttcagaggctccctctagcagtgtgaggacatctgagtgtctctcctactcattttatatttcatttgatactgcacagaatcactaggagaacagccagaattgatttacttctcatagagacaaactgtttctgggagctagttatcttcttattaacaaagagcttacattcccctcccctccagagctcctaaaacatctatataatagctacattaagtgaattctacaatgattgaaaattttactataatgaagataaaaattcactcaattctagttcttttatccttgatttgcatttgaytgaaatgtgtatttgcagtttgggcatttcagtcagcgattgctcctgtattctttgcccataagcagccttcagatggcctcttagaaaattgaagaagtctctacatgactggaaaactctttctgatggtctgtttcttcaaagatatagcattacctcttgggaattatagaaacaatatatattgttaagcctcttctaatgctactgtaatttataactggtaactttttcccccacttagcattcaataagcatttattggggcctaatgtgtaggtggaattttggagaatacataaagtatagaacacagagttcttgttcttcaagagctaagcagctctatagagaagagagagacagaacgacagagacagagacagagagagagagagaagagatcaacacatatccaccacttgctttactatctatacttcaacttttggtggactcatcccatcttatggattcaattatcatctataagtagaccacttccccaattgtttctttaacccagacctctcacctgaactacaggcttttattcctcacaatgccttcagcattttccatttctaatgggtaccycaaacattaagtgttcaaaactgaatttctgatttcacccctttcccycatccttgtctgttgtagtgtatggcaactccaattttcaagttactcagtgcaaaacctttgagttgtccttgaattctcttctctctgtcacgccttatatacaatgcatcagcaaatttgtctggctgtaaatctgaaatataccataaatataaatacgatcacttctcaccactcgaaagccactatttttctctctttaggactatttcaatggccctttaactgctcaccaagctactgctctttttcctatttctgttaaaaaatctatttttaacagagcagccaaagtgattgttttaaaatgtcagatcgtattacactctccctataaccctccaatagttttccttcaactctaatttacataattccctataatgccttatatgttcaattatatacatatacacttaccaccatctctgtgaaatctctttctcctacttccctagtatgagtattgcttaggtataaatcagaactcagaaaaataagagtaagaattaaaaaggacatatgtgctgaaaaaaatagagcaatgaataaatactggggaagtaattagaaggaagagattatacagaaaccataaggcaaaaagttaatcaaatttatcaagcatattataggggacatggccaactccacaatttgttcacctataatctcaggcaagctatttaccttgtctgagtcttagatttggcctcagcgaaaggaaagtggtgatacatcatgagcagggttgcagcacagctggcataaatggaggtttatcccacacatgtgggctgaaaatattagaatccaagctaccaaggtcagagtgcctggctaagagcttcatatggaaaaaaaacctttaagtcaatgacaaaatgggagagacttttttttttcaggcagtatatagccaagaatctattccttgaatgctggaattgaaggttatataaaagcacttattactaccaaattgcaaagaacaagcagagcaagtaagttgagagagagagagagasatctttcttggagaacatttttggaaaatgactgtgggcaaagcaatgtgaaaatatttagggagacagaagactacgaagataaaatacctatatcaagaagtttatattgaaattgagaatataaaacagatattatgggataagtcccataggagagatacagaaaaacagagaaatgaaggataactgtaaactctagggaggcaatgtcacaaactcaggtgaaaatacattagaaaaggaaaactaggtatttttcagtatatataatcaggctggaagataaaagctggttcagagactagtgaaaacaaatcaggctggaagataaaagctggttcagagactagtgaaaactaaattgttcctataaggactttaaaaggagatcagcatgtgagtagacttggaggcctgctaaagagggagctaggagaaggaatagcacgtggtttctgagaaacagtgtagcaataaggcttatcacacataaactaaactaatcatgatgtttttgtcactattgtgctgtcagagaaaaaaatctattgaaataatgaaacatactaattttgagaaacatcagtgtggcaaaacccaagaaacacttttcaaatgaatatactcaaattgcaagatcaaacatctattaattataataggtaagaaaaaggaaacattcaaaaaagtccttcaaagcgaaaatatgtaaattagagtaccttcataatcaataaacacttattgagcatctattcatgtgctatcaatgtgttaaaaatacaaaagtgacaaaaataattattgctcaaaattctgtgcagtatttagaaagattgggtagggataaacatgtatttctctaagattacattacattatgataaggtttatggaaaaaatgtacatacctatgtatatgtaaaaatagaaaagagtctaaaagaactttttcaatctcaaaacagtgtttacatatgaggaaatgtagygatgactgttcattgtttataaatatctgttctctcctttcttagtaatacagctcctgaatcataatagccagatacagacttcccacaatatgaatttcccagtttctctccttagctagtgtggtcatgtgactaaattgtagccaatgatatttaagcagaaatatcatgtgatgcctctgagaaatgttcttaaaggaaggatttttattcttattcttatcttcctcctttcttctggctggaatgttaataggatgacttgtgttcaagcagccctctaaagacatgarttggaagctatgtactgaggagcacagagcaacaagagaaaataagtaaaataagtttggttcttagctctggaagcgtgataaacctgggatagtcagccagggaacttctttcatgttgatttttaagccagtgatattttgggcatttcttttacctgcaggaagaaaataggctgattttatrtaatttgaccctttaaaaactagaatatattcatacatagtttttacagttcagtgtttaaacttatttatttttcatcttagttttgcttccctatgttttgtaaatggtaaacttattagccattctgtggtatataaaagtttcacttttatgttttgtttttatattggcccaacttccatgttcagctaaatacactaacataatttaaattactgcatttcattgggaatccaagttagaaaattccttttcccacatttttaatacctaaaacttgggaaatgaataacattataagtacttgaaaataatattcactgatttatcatgtgtaagccctgtcgaaatatttattttctactgagcttggaagatattttaaaatgattccattaaagaaatttttaaaatttttgaaatatctatttacttaagatgttgaagaaaacataagcatctacctttaccttccattttttagatctcatatgatatgacaaataaatagaaaattagaggaaattttacaacagtactctaaattaagtaagggtaccctccatgaaccaggaattggcagatttcaaaaaagcacactcctaagaaatttctgtttttcacgtgaccctgacaaaatccattaattgtcctaatttggaagggtacaaactgcagaaaagagcagggtattagctcagcaggaagcataatatttcattgccaagttgctgttgtgactcagtagcagcacttctgttatcttctgcatggctcctcactcttcagcgagcaaattaggactcattcacatggtgatccagggttcctggcacagcaagatagatggcaagccattgtgccagccctccaatgctctgtttgtatcacattgcttttctcccattgatcaaagcaagttcctggctaatcccaaagttaaaggatagggaaatagactgcaccaattgttggaagagctgaacagtacattgcaaaggggcaggaataccagaataggaagaactttgtggctatcttatgtaatctgccgtgctgatcagttagactaataaaccaagagaagaaatgaaggataataaattcaaatacctaatagagatcaggctgttaaggtataaaagtaaagttgggtatagtacctatgcacacaatgtgcttgaattgtgagagctaaagtgaattgaagatctcatgaactttccaagggggcactgtctctcaaattcaacaagttgcttgaaacagactccagcaattttcacatgaaattgtaagtttgaatttctatgtagactctactaattttgaattctggctgaagtattttaaaactgtggttgaacataaccacatctgtaagttacttatgaatcatggaccatcaacatgtgagttttgatagagaagactgaaaggataacattttacaactctattaaatataatataaatagtacaattaatatatattttatataaatttgtgtcctatagacactgaagacccataggttaattacaaaaattgataatacatcatgtgcctccaactccaaaatttatatacaacataagtaatacctaacaaattaccagattaaaacacaataaaattaagatgaataacattttaaacaaagacaaaatctcaaaccacttggaagtaaaaatagcaaatgagcaaaaactctcatacactgttcctagagcaaagaggaaataaaaactaaaagtatagactatttagaaaataatgataacaaaagcactacatgtaaattgtttttaaaactttgcttacagaaacgtgttcatctttaaactctacttaattactaaattaaaataatgaatcaagccttcaactcaataaacaaaatatgaagccattaaagcttgagttaaaatgcattaaaatctgtattttagaattcataaatcaatagggttaattgaagggaaaaaacagttctttgaaaagatataaaacaaaaacaagccttgggcatgtctggttttggaaaatgaaatgcataaataaaagtatcaaaaacatgtgtacaccacaattaagaaaaattttcacaagcatgatggaacagtaagtacaactttatcgtaattatttgaaagaaacgtatggcatgaattattatcaaggaaaacatcccatcattaaaattgacccaagaagaaatagaagacaattaaatatatgtccaatatgacaaaaaatgttatttgtttacaaacaaattaataatgttatctcctgcctgttttcttaatttcaggaaagagtaggccaaatgattaagacatttcataaaagttayccaattaattctgaagagctagagtaattcccaaaagaatggctgaaaatgaaatcacatacaaaaaaagaaaaaacattcaatatcactttagtagtggtaataaaaatacttattaagtgataattgaattcttttacaaaattcttttggatatgaatatccaaaaatcttaaatgtcctttcatatttaatccgtcagcatattagaacatagtaaagtattaccaaacagggtttattacagaatgagcttcattcaaccaaaagataacaggagaatctttggcaaaatatctaatagtaagcaaagttggagacatggattagataataatatgaaatcatcatgtgttctaaaaatgaaagaatggtattaaaaaatcaaaggaaaaggggaaagtaggggaaaataggatatcgtaatgcactttagggaataagtggaagtaacagattttatttaaaattttcaaaacgttaactggaaaaaaaggagtaaaagcataataaaatttttaaatattgaggttaaaaactataataaaagtgcaaatctttctagatagtaaaagaaaaacctaccaaagaaaacatgctacatagaaaaacacagtaaatataacaaaatctacacaataataaataacataaagaatagattaaataagatacatttttgggatatggatcaaacactacaccctcataatatgccattttctcaagcatacatggaacattgacaaaagtcaatcatatattgattggcctcaaagaaaacactattaagttccatttaagtactttattacaaatagtgttccctcatcaaaatacaataaaactagaaatttagaagaacagtaagagaaggcttttcacctgaaattaagaaatcatcatgttaaacaactgtagaaaagagaaaaagaaacaaaaattatctttaaaattagtggtaataaaaatactatatatcagaatctgtaaaggatacttaaaggcgtaattagtagtcttggccctccccttcccttcccttcccttcccttcccttcccttcccttcccttcccttcccttcccttcccttcccttccccttcccttccccttcccttccccttcccttcccttccccttcccttcccttcccttccccttcccttccccttccccttccctttcccttccttcttttcttctttccttccttcttctccatctccctcctatttttcctccttcccttttttttccaccctttcttccttcctttagcatttcttcaatccttactttctcccaagcaaacctggaatctttacattgtaatattatttaaaagccaaataaaatcaaataatatttaagaaaactatcaagaaatttcaaatatttacaaaaatttattctcttgaacagcaagagaaggaaacagtttagtaagttagataggcagaagtagacctagtacttgtgaaatgtgtgccaaaactcttcagtaactattttccttctgctttctgtagaaaatatttaaagttgaaatgaaagcatttcctgaagtgatacgtgaattactacaagcaatatgtacaaaacatgaaaaacagaggtgatatttagtttggaattgtcatattcaaaatcagaaataaaattttcattctgatagagcagtgagtttgattttattctcagattaaattacagaatggattattaatcagatgtgttttagatgattaaaatagcagttcatgtttttgatagcattagctattcaggatcaaatgaatatctgattaaatatgtattttgagttcaataatgccttttacaaagcactttaaaccctatagacaaacgtggcttgatggcagtgtagtaaggaatatttataggtgattgaaaagctatatctaaagttttaactagtgagctatcatcaaagtgcatagaactttagaggcatattgccatactttgaacttgccaatgtatgtttcatcaatactttactagtaatgtgaatgaagaattaaaggcttgctcctcaacttctgaatggctcaaacatggtaaaataaagttgacataatgaatgagaagtatagattacagtagatgtgaaaaatacaaaagaaccaaagaatgaaattaaagagacaaatataaaatctaacatttgcttcaaytgcataagactttgtgggctactagtttgatagtgtttattttaaaaatatttttaaaattttatttgaccttaaatttagcataaggcagtattaaaaatcacctaataaaaatgatacagcctccaattttatttaaaaagtgtataatttatatcaattgaggaaactgattatttagactgtgttcacaggagaatgacaagtattttgagggacagaaaatcatatctttggaaaaagtttgaaagcttgtcatagggcagatctatttagattgataacataatgtatggatgacaaaactaaaacatctaataaagagtacagggaagcaggtattgattcattataaaatcaaagttttataataattagaatatttcaaatgcaaaattttcatcttagaaaaagcaactggacttggtgtaatgttaaaataatgcatgtaaaacacatgatacttggtatatagtaagcactaactaaatgcatactattaatcttaccaatataatgttcttagcattatattcaagaataaattagatctttagttgttacatataatcatttattttagattaaatttagagtaaatgtatttcaatttgtctaagcttctaagattcagtgattatattgcttattagtcatgctccattgtatcatccatccatatccttttcatgacttgagagaatgcaaatcttgtatcttctctcaaggaaaatattatgactatataattaaaataattttaaaaatgtatttatattccagttttagtgctagtcctaatcaaaatttaaataatcattttacaataaatatttgacatataatattttgtaatatattgaattttctatagtagatgcctaattatcttagctatttgcaaataatgtaagtgtaaatatactgataaatcaagaaccttactttaattattgacataattattcaggatattaatcttttatcattgctataaaacagtcaattttcatattgccattttctttttattatktaaatacctctctctgttgggaatgcagacaaaaagatggaagagatttataataattaggtaatataagtttagtaggggctccatctttatttattcatatattcatagcaagtatttattgaccatgaattctatgccagaaaatgtgatatgtaatttttttaaaagtcacaatccttgctttcatggagcttatggcctagtggaggagtcaaacattattgaaaagatcatataaacatatgtaagattgcagctgtcatagtggctaggaaagtgaggaatgtaaacttctgatagtgtaaacaaattattgttccaatcaaagagatagtggatagcttccctgtgaaaatgaaaatcaagctgacatatagatataaatgagtgtttacttgaagtttcaggagggtcaatccagactgtgggaacagcatgtacaaagaccatgcatcaggaagaactgctggaagggaaaatggtacagtatgaatatgttgaagcaggttggggatagcctacrtaaaggtgtgtagaccatgtttttaatctttctcctaagagccatgcaaattcattgaaaatttttaaagtgtggcaggagacaggatcagatttgctctatagaaagactactttggctacaatagggagactgaagaggaagaaaggtagayttcaggtagtcttacaaggagctggagcctaggaaaacaatgaaagctggaaatagtaaagaaatgaatggatattaggatgctcaggaggtaaaatcaataatgatagatttgatagggggcataggctggagaagataatgaagctaacaagttttatgacttatataaaaagacaccattaaagcaagagatgttggaagaggactggttgaatatcataagtatgatgttggccatgttaaatgttaaatttgaggtatttttaagtcatttagtagaaatgtcaattatgtagttgaataaatcagtctagatcccagagctcagatacacatctagaaataatacatttgtaaattgtgtgtagatggggacaatagcagtaatgaacacagatggaattgcctaggcagaagagctcaaatgagaaaaggatgtaggcccaagtccagagaactgctaacatgagcttgaaaaaggaactgagaaagaggtgtatgttatgtcatgaaattcaagggaaagttgtgtttgtgatggagggagaaatcatcaatgctaaatgtcaagagacctgattagatgagctttgaagtatatccactacgttcaacaatacaataattaagaagtactttttccatgaggaatagggtatccaacaatatggggaaaaagagttttctcagagtgactgggatatataaaaatggagagaaaatgtggtaatgtggagtaaccagagagtagagggaagggctcaatctctttgatttcattttaacaagaaacaaagaatcttttaatgggaaatctagttaataggatgatgttgaatgcatgagacaggaacttaagtatctgaaatagagagagattgatacatttaatgatggaaggttagccttaggaaaggggacagctcctgtattgtggaagcagataaatagagtagactgggtatgggctataggttggaacacagaaataagtatgatttttaatctcccatcttctatgttctctatataataacagtaggattaaagatgtgacaagtcgttgtaaaaagtggacaagtgagttgaccaaataaataaaaacctaagaagggtaagaataaataattgtctttgattatttctggttatgttgtttattgatatttaggaagttttagaactgtctttctgaattagtggtccttggcctttttttttttattatactttaagttttagggtacatgtgcacaatgtgcaggttagttacatatgtatacatgtgccatgttggtgtgctgcacccagtaactcgtcatttaacattagatatatctccaaatgctatccctccccctccccccaccccacaacaggccccggtgtgtgatgttcgccttcctgtgtccatgtgttctcattgttcaattcccacctatgagtgagaacatgcggtgtttggttttctgtccttgcttggcctttttttaaattttgcttcagtgcagcacctctaatataagtaaggactaccacatactcattatccattacagtgttctgctgtatcattgattctgaaggatggagtgaagcacctctttaggaagactatacaaaactcagagatgggaaagagagagagagagagagagagagagagagagagagagagagagtgtgtgtatttgttagaaaaagttcattatatgattctgatatgcctcccacagggaggctagaaatttctccttgaaaatagaatagccaaatgttgaaaatagaccagaatttaggaatttgtttatagatatatgacaagtaattgttaaatttaataaatagtgtagcacatacaaataatcagctcccttttcctaaataaaaaactttagctatttttattctattttaaaaattcacttcgtgatatttaaaggtatccattattaaaatcagtaaccattccaatttataatcatttaaaagtaaaacatataattatttattagaaaaatatttgtgaacattttataaatattatcaacatgttgtcagtaaattcctcctcaggtggaattttctgactttggttgagtcattaaatgttttgggtcactagtgatcaattagtaaattactgatccatagtactttaatggcctgaaaaagtaaatgcatcttctgagcacctaattgaatcttagttatttattcatcattaaaatcaagataaatgagtcagctcacaataatgaaactgaacagttacattcatttcacaaatagattaaactaaagctcagaaaagacgggacaagggagttaaacatccaggttagattttccatctgaaaagacccaattcccaatatcttgctataaaaattaaatacatatatgagtttgaaagcaatatttttctgcaagttcattttcatatagcgttattaagtttaataccattcagttaataattgtagatccatgrtacgtatactaatatggtcttgttataatgtaaatagtacagtttaaacagcaaaatttcacactgttttaatataaaaaatttcctagaaccaattaccctgagtgcctactatatggttcatttggaaaatgaatgatagctgcaatatggtaaaatgattatgagcacagccttcggaataagtaaaacatagctttaatatctaacttctgtacttactaactgagatctgaacaagttacttaaacttctaaggtttagtttctccacttacgaaatggagaggaaaacacataattcatagttcattgtaaggactaagtaaaaaaaaatacttaaatacttagcacagggcctagcaacaaagatatatgaactcggtacacacagacatacaaacacgtacccacactgcttaactttagctagaatatttttaaaagcattattagtttgagactagattcatccaagttggtttagcattctactagggatgttacttttcatatctttctttgtttttgttcccaaaagctataaacacaagttttatcttctttcctgaaacaattaaaaagaaaatacaagaaaatgttcaaaaaataatttactagtgtttttgtttgtctggaagggtcatcctgcagctttaatcacagctgaagatcattatttcaaaaaagacacatcttttagatatttaaatatgtattatcatattatgcagtttaaatgtgaagtcatctaccctctggtttactgagattctgttacattttaaataaatagtaaatgctgtagttaagagtgctatcactgagaatctaagaagacacattagaaagggattattactccaagaagaattctctttccttaatcattactttttcattaaaatatttctgaagtttatacaatacaatcatagtagtgaccttaggcatatgacaccttagtgctataaaaactctaacaaatctgtttagagcccaataatataaatttctgtgaagagaaatataaaccaatggtaaaatgccatgttgaagtttctaaatagcccacctagtaatttacatgttaagaacatattgaatatcttgggaacatgttcctagaaaagattctccattataagcttttcctttactgttaatgattgctttgataaaatgacccacgaaaaaagacaattttctccctgtgttatctgtgtctgaaatattcttcactgattttacatatgctgataatatgaacaaggtaatttgtctgactctggtggggcaagattttcagtaagaaatgcaaaattcacacatagctcttctgtaagaagtctwtgcagtgtttcagtttatataaaaagatttatattgcctgaggcatctatttttttttcctcgaggcaagctgaagtggcacaaatgaaattgtttttcacactgttaatgtattcctttctctttcaatttctcagagagccgacatagggatttctgctttaaccatcactccagatcgtgaaaatgtggtggactttacgacacgttacatggactactcagtgggggtactacttcgaagggctgaaaagacagtggatatgtttgcctgtcttgcaccatttgatctctctctatgggcttgcattgctggcacagtccttctggtgggtctactggtctacctcttgaactggcttaatcccccacgattacaaatgggatcaatgacgtctactactctctacaactccatgtggtttgtgtatggatcttttgtacaacaaggtaaggagcaaaagtacattctagtatttaaaaaaaatagaatgtgatgtttccaaagccatgtattcagttaataaggttctgtatctgacatcaataagtgttctaaagggtactcacagaaatgctcagaaaagaacatttgctacttcctcctagtggatctcagacacaccaagtttccagcaataatggttcattgtcttttgatgtaagtttaatttcatcaacaaaggcaaatgtgaatgtcaaaggtaaagctcacagaaaacatcaagatcagattttcctctccaaactctgactttctgagaaatagccttataaggatgaaattacttattaccagagaaggtactatttaattatttacatatgtaagaaatgttaggacttgttctttgttcagagacattatttcatgcattaaaaatattgtcattgaaaagactttggttaatttgagactgatgagaaattttgtgttttatcttttactttgatatgtaatctttactggtgatttaacttacaatttcactattttctaaagaatgtcattgctctgttatttaatatccaatctgcccaactctttaaacttgtccaattaattatttggctctcactgtttcaaaatagaataatatttattgcattccttacttgagactattgcctcatagagaatgaaatagtaagaaaattgatagtctcttgcaagctctacacatatattgaagaggaggatgtttgctacaatggagacattatacttttgtgctaatatttacaactctcaataacatctttctttttattcctattttctcttggaccttccatttaacttcatttttctattctaatttaatcaaagattagtctagaaccttcatctgacttgctaacttctaatctagcccttaaaccttttgtaagcatgcttttccctccacccttccatatccagggctctaagcttacctgttactgtatatttttcacagacacttttagttctttcattaataattaattcagtaaatatttaatccacactatctaagtagaactttcctaagcaattagtgtatgatggtgagcaagaaggtctttgccatcattgcgccacaacagaagtctaatgagacacaaacatgtaaacacaggattacaattgtgggtagaaagttctgtggtaggataagcatagactgttaggagatcataggtgtagaagcacttaatatatgttaatgtcgcagagaaggctttttaaagtaacactttatacagagagacagagttaactatggaaagtgcttcttgaggaagatgaatggagaaaaggagacataaacggttaggatggaatttcagaccaagaagtgagagagaaattaagatagtccaagcagagaggatctagtaaagatgaggctgaagctacatttgttattataaggagtttgaactgatccttgaaatgatcagatatttaaagataataaatgggaaaatacagattcaaattttactctagaaatattctggttataatgtggagaatagattgaaaaaaggcaatgtgaaaagtcagacaaattagaagactattacaataactgagcaaagagttgatgtggcttgctcaaaggtaaggtagctttgggagtcaagaggagagtattgatgaaatggaatcaacaggctttgattacctatagcgtggtgtgggggtcagtactgaagaaaaaaggagataaagttttatcctaggtttttgaatagaaaattatgtatattggatgtggatctcatttactgaaaaaataaaacagaaaaaacagatatgacaggagagatgatacattcattctgctgcacattgagtttgagctatccgtgaaacatccaaaagagtattactaatgtgtgcttagtggtttgatatatttgtcagatgcacagaagagacatctggacttaatatatatttaggagatattggaatgtaggaaattttgaagacatgggagttaatgagatcacacagagtagttgctcttaattgcaaactcctgattgaggaccactggcccatacaaagcctaggacagagctctaaggaaaggaatggatagaggagcactcagtggtgcctgataaggagtgactataaatgcacaagtgaaaatcagagcagctagtagtatacgtttggttgactgtgttaaacctttcaaagaatcaaatgaaattaaggcttgaaaggtttttgttggatttaacaataaatttattattgaagcaaaaaaggcttgtctttgccctatgatgtctgaggtttcagctagacaattcagaggccagaggctaaaatcatccaaaggcttgttcatttcactcacatgtctggtggttgatgcggtctgtgggctagtggcctcagctttttctccatttgggcctctccatgaggtcactttgcatgggatagtttgactttctcacagcatggtagttgctttctccacagagaacatcccaattaaagaattttatgttccaggttgggagtcataaacttgtgtgatggtgtgaattcctcttgcagagaacatcctggatgtacccacctcatgggtttttatgagaatttattaatgaatggttaaaattgtgaagttcttagatataacttatataagtgtcacataagtgtttactaaataaataaaacaatgaattagactcagcggcagataattgacatatgtaaaaaaagggataacaagacaaatgattgtagatcattttgatgtasatattgattgaaatagtagatcatggggtatatggagaactagaaagagaaggaccaagaatgcgaatgtaaagaagagtaagggtagaaattgatagagtaggcctggcatggtggcacatgccagcactttgggaggccgaggcaggcggatcacctgaggtcaggagttcgagaccagcccggccaacatggtgaaacaccatctctgctaaaaatacaaaaaaatgccaggcatggtggtgggcgcctgtaatcccagctactcaggaggctgaggctggagaattgcttgaacccaggagcgggaggttgcagtgagccgagattgtgccattgcactccagccgggatgacaagagtgaaactccatctcaaaaaaaaaaaaaaaaaaaaaaaaaaagatagagtagttaggagagagtagtagaggtctcaataagattacagaaaaagagtgaaaacataattataaatgagtttggagtctgtatttataaaataggacatctaagcctaattttttttgaaatgtaatagaggagaacatgttgtaggtatgtggatacaaattccagatgttaagatttggtgaaggacttcaaagctgatcaaggaactgagagataaagggttaggtgagccagctgtaatgatggcttggattagactggagaaaaagaaattgagccatgtgtcaaagttgtgaataaataaggaaggatgacaaggatgttgatagatatgagcattgaccagaaataggaggtgacatacctagatataattaacctctgttttcatcttacttcttccaatttattcagtttttcagtgtatgatttcaacaactgccaatatgctgatgactcccagatctacatcatctattcttgaacttcagatttgtatattcaactgttacctaggcaactctctgactataccagaggcaccataaatttgaacatgccaaaaatgtaattcattttagaatttgaaccttcttagcctctcacattctctattccagctgatccaccaccaaccattcagactcatgttagaaactctgaaaatagttttcatttcttcctctttctcatcttgtatatccaaccataatcaagtcctgtcaattttacctactaaatatttctagaagtggaaatctcttcttatctagaaagattagcctagattgtcacctagattgaggctacctcatttttcacctgaactataggagtctcataagtctttcttcttccagtgttgtctcctgcaaatatacgattcacatacttgcatatatacccaagttatccatgccatggaaagataaacacataattcccattcttcagttattttcttggcttcccaatgcccacagtttagaagtctgagttcttcagagcataaacaatattccatcacctggctcctgtccaacactcagttctcatctcttaccattcgtgcctcacatttaattgcccagttactccaaacttacggtttgaccataagacaagactctttcctaactcttcaccttkgtatctgctctttccaattccttgagtgcctttgttaccaacctgattagactctactcccactctctgtctttatacagcaagttcctattcatcctctaattttttgcttttatttctctactttcaagaagtctttcctgggattgagaaccatcttctatactcctcaacatgtatttgtcatagtacttaccaaccatagtgtaattcctttttttaaacatgtctccacctgagtcctttgaatataagatagtgtactatttaatctgtgtagtctctttgcttatagttaagtgccttgtacatgttaggcatttaataaattcatattgataaatttaatgaatggatgctaaatacttaactaaataaagcatggaggttagctgcaatattttgtttattagattatagtctcaaataaaacactaaaattatccacaaatgacttaaaactcactaaaccaaaaagaaatttatctgtaatgtccccactgagttgttgtaagaaactaagaggagtttataagtaaggcatcctcttggttgaagcctcatttgtgaagacgttgacatacttatgaattggctttctgaattcttcctccaagtgaccaaatttcaataagttttggagcacacccaggaaaaaagataaatagaattacccatatggttagcatgcttttctagttctataaacatgcaacagataacaaaagttataaatatgttaaatacctttctatcccactgctcccttaaatgagttgcacagcctgcaggttgattgtacatttatacaaatttataatgacagataatgctgaatcgcatatgattagctacttcatctttgaaaagctgctattmttccacttgctaacaatgaaaaggtgaattcattaaaagayactgagagcatctttatgctctgattaaaaataaatgaagaaaaggcttataaaccctatgaaaaagagaataaatcaatgacagtgtccatgtataggcaattgacttggaactggtgatatttccaataaaaatacagtcttttaagaggaagtacagctgttatttcagaattgcagtcttcattgagccactataccagattgaatagggataaagaggcatttcatgtgttatcagacagatttctaaaaaaagagttcacggacagccaaaagcagaaaaatgttaaatatatgtgagttgtttactaatcctgacattttaaaaaatctgtaacttcaaagcattctggaaaaatagctcagggaatccaactgtgcaaaagcagtatggtccattatagagataaactcagtacatctgtttggctggaacattaagagcttgtgaattaggttgtaaaatgcacgaatgagagaccaattttatacaacttttgttgtcattttatgtcctccgttatctccatgtstacatacatctcctttcaattaatattcttaagtgaaactggatttgatttttagaagtctcttatgtttagtttattggcagtgactctatcatctggtctccagaggacttcaatgactttgcaaatgtagttgtatgtaatttkctttctgtttacatgcaaagggaaatttcagaattatcttcagatgtttgtgtctgattatgggaaatagaaatatttatagtcatgtaaaatatttgaagcaaccacatatatgtttatttagcagcaagcatttattaagcaccaacaatgtgccaggaacatgagtagcaaaaggaaaataaggaataactcttaactagggtttaataaatatttcacgagtatactatgtg

SEQ ID NO: 4 - DNA, 98750 bp, Homo sapiens
  modified_base (6390)..(6390): a, c, g, t, unknown or other
  modified_base (20074)..(20074): a, c, g, t, unknown or other
  modified_base (31843)..(31843): a, c, g, t, unknown or other
  modified_base (86020)..(86020): a, c, g, t, unknown or other
  modified_base (86947)..(86947): a, c, g, t, unknown or other
ctctaaatattttccattgatgaatttctaattgtttttggcctaagtagtctgaaaacaatacacagatttagggttgcaactaaaaaaacgggaggatttctaagtgaatgcttttgaatcctttgttctcattatacatcagaatgtctgtgtacagcagttaaggcataaaggaaagtaaaaatgcagttgaatctcaatactgtattttgcttttcagaactgcaattcttcaatttacattasgcatttaagattgttcaggaagcaaactaaaataataaaacaaaatgtccttaaatgtaatctcctttacttctacatcacgccagtgtgctactgggtatattatatatcctcccaatatatatttaaggaggtggtatgggtccaatagtaagaaaattttcttattttttcctgacaatattctgctaaaaatcatttgaatatgctgcactgtgatgcattacaagtttggtagatatcagtattcaaagttatttaaacaaatactccattgatggtataaaaataaawccttcaaaatgcataagaccaaatatatctatatttgctatttttacatgtttttaaaggtacagtattaaacataaagctgtccaggaaaaattttcctcaaaaagaaacgtactaaaattctatatgtagattcttggcaatattgttcataatcatagtacaaatggttcataatcacagtacaaatgtgaagcccttcaaaaataacatcagttgtgagctggctaaaagctaggagctgaattctggcggataatgagggcttcttatatttactctctatacttttctgcatttctgaagatttttagccaagaaatggctaacaaaattcaaataatggaagtctatatattttaaaaacatttttaaaaatctgaatcatccacagatttaaagggaggtaaggaatcatgactacttggayaaccaagactgaaataagttttctaatttttttagaattcaagtaaatctctaaaacaaaggggaacttgtccttcaaaaagaaagaaacaaagcaaacgacraacactccaatctgaaaaatcctcagagtaacagaaaatgaatcttttaaaatgtgttgtgattggctcccaggttcaagcgagtggctcaaataccaaaaatctgtgaagtgatgtttcatttaggactgaataaggtttttctacctccttctattgtggagacaggatcacaatgctaatgttaccacagggcatgsaaaaagcctgccaagcatggacacaatcttattgaattgtttattaattcatttcttgagattcacaaaacagtgtaataaaaactttgttcagttttgcaagtataatagacaatcaagttttcactttagtatcacttacatagttaagtaatgtcaatttttaatgtcacctagggctttatagctaaaggtgaaaaaaacgtattcctcgtcaggttaaagtagtatagatttttagaaacagccacaaattaattttataaactttatgtgcaacatactaactggaatccataaatcagtataagtaatttggcccrataatttatttgcaatgaatgtatttaattaccatatatttttcaagcacaattcaaacatataccacatgacaaacagaagaactactgcgtatctaaaaaagctattttaacactcaaactacaactgatgaaagttatacaatcttatcttgaccactattaacacgtatttcttcctagttcatgtgtaaggaaagaatacataactgatagtttgaacaaattacagtagagtctaagctttctaaataattttgtaatcagagtaaggagttttcaaaagctaagtaagtcttacctttatgtagccccaagacactgacagtaaatagtttgcttcaggcatttttgattgattatatgtatatatatatatatgtatatatatagtaagctctaaaatgtatttagcttcaaaatctcgacactttaacaacctccacaagccacgcagagtatgagtttttaaagatttttggtaattaagtatacataagaaagcctcgcattaaatcccatccagccgtcttcccatcgaatacatgccatttgtaagactccagaatggcacaaaattcagcaactattctgaataaagaaaatccacgtgataaaggaatatctaaagatctaagggtctgcatctttctctcccgagctccagggcttaatgaataatgtatgtcaagatgcttagttgcaagaaaggctagtcctgtcaaaagctaccaaataaggaactgcagggaagccgggaagagtgacaagaagcccctcccataaaaccccaactctgcaccaattgcattccagctcttagcctataaggcgagggggtgtggcctcggtgcaggctgctttgggattggttggcaagggccagcctctggggaggctttctcctcacccgacaaacgccattgaataatggtatccctgcagctctgaggccaccctgagaaaagatgaacggggcttccctcttgcagtgatgaataatgaccataaaactcctcaaaattcgtagttcattcttaagaattgcccatccttttggagggcattttctatgaattttaatgtcctctggcttcccttccttccaaataaaaactgctccaaaaatggcaatcgagcattttaattgcttccytctctcaaatccaaaacaagtggctccctggtgatgtagaaatgactgtagttctcccctcatccaacataaaagcatagggattaaacaatacgactaatgtccagaattcacagatggcacagatggcaatgacacattccctcacctgtgtgscatggctgctctcagctccttttgtttctattgttatgtatgacagagttctaaaaccttcaaaatctaggggtgggaccacttgcaattctggggggagggaaatgtgaaagctagggcactgtgtatgcataaggaatgcagtgttttgtatatagaactcaggatctgtattttgatcagaagagaatattttatttatttatttagagacagagtctcgctgtcgcccaggctagagtgcagtagtgcgatcttggctcactgtcacctctgcctcccgggttcaagcgattctcctgcctcagcctcccgagaagctgggattacaggcgcccaccaccacgcctggctaatttttgtatttttagcagagacgggatttcaccatgttggccaggctggtctcaaactcctgacctcaggggatctgcccacctcagcctcccaaagtgctgggattacaggtgtgagccaacgtgcccagccagaacagaacattttaataactgtacacaaagttaagaaaggaatgagtggctcttaggaatccagaattgagctcaagagtaatcagacattttacgaggagggttaaatgagaaatcaaagttctttctagaaaaacagcattttctatttggtttggtgtagtattaccctgtaactttaatactaaagaggtcttgtgggtgagaaacaaggaaaaactaggttttagttgattttagcatataattctgtgcattttacctcctctccatctcaaagcctgtgcttactactctgtgctttaacttgctggtatggctactctgcagtcttcctgacatttaactatttccacatgtggcatgtctgtcttagagagcatgctctctgataagcactcctgtaacactgtgtctctctgagtttctattggcctttagctgctacagtcctctgcttttgttaacatctgttgtattcatttccatcactcttactcctctacaaaaggaagaaattaaagctccaacattccactaaagctacccccagaggaatactaaggtcctccttttctctggtctccctacttctctgaagtgttccacatgtttgatcattcctactactctccctcaactcccaggatcctgaacttctttaattttccctaggcccacaatcttcaatgaccacttctaacttgaacttcagtgccatatttctgaatacaagattctcctctcgaatgccctgctagtcacgacaaactttttcaaaactgtgagacatttttctatttaaagtagttcttagtataattacttccatttcagtcagtgagcctatatttcttccagtatctcagatggaatctatgactctttcctaccattcaacaggtgtttcatgtgcgtcagacactgtcaggtgtttaatataaaccatctagctgaatccttgagtaacccggcatgttcccctatacggcatcaccttccctccttcattcaactttgttagcaagccctatcttttatccagagctgtttctttcagtttrttccttaccattacccctcccgtaatctgaatccaaatatttaaaagactgagagaaatagaaagtaactttaatatcaccccctctaactccctcatttccacataaagttgagacctagagagaaaaaatgattttcccaggttcactctggtactgagaacaagaattgcaagtttaaatcttttgtgcacaatcactgacaaataatctttttagtgtgtcagcttcctcatctgtaaagtggattactgtggcagctagtctccaaagatactcttaatgagccacactgtcctacactgaatctgagttggcttgtgtaaccaacaagtgatggtgcatgactgctgaggctaagtcataagaaatcttgcagctctcatcctgctttctttgaatgtgctattgggacccctaagccattaggttgaaaaaaaaaaaggtctgactactctgagaggctatgctacaagaagtccatgttaacttcacagacagtgaagagagaaagcgcaagagagcacttgcacaagaaagagcacacatgcctggccagtcttcagcaatgccagccaccccagcccagagccagacctgaggggcaagaagccatcctagccatccagccagttcagctttcagatagctacccactgggctgcaaccatatgaggaatgccaagcaagaatgtctagccaagaccagttaacccacaaagccatgaaaactaataaaaatacattcatatttcaaagtattaggtttgaagtgatttcttacatagcaataaataaccagaacagatacatatgaggattaaatgagaccatatatgcaaagcacttaaaacaacaaatggtacaaagttgaagataagtaggtatcagacagtaaagatgacagtgacaatgatcattatgataatcattctattatactaatatttaaaaaaattctctggtttgtcatttgtttttaaaatatatatgttatatttcctttcaattgcatcacagcactccatgtctcagggccaaaatgctgtaattgcttcttagctcatcttcttgcccctggcttttccccttctagtctcatattgacctctactgccagatcaattttcctcaaatccagccgcagcctgttacttcaaagctagtaatgcctgcttcatcacatccctctgtaaattccagactgccatatctgaccttaatccccaacgccaagcctattttcagctgctctattacatttgctctgttcctgaaagactagtaytcctccaycttcaccatacagctgacaatcccatctctgtcttaccaaattctcggcctaaaataccctccttcttctactctgccaacctcaaactggttttctcagtcagatttaaatcattcaaagtacatcttaggaccaaatattccagcctttttccaaattctaacgattctacatctgccccttcattcaatatttattaagctyctacyctatgtcaggcactgcctgagaaagagaaacaaagctttctcacctgcagcttatattccaaaactaagttaataaatacataatacgtcatggggtgataagcacaatggagagaaagaagggataaggattacggatagaggttgctataaggtgatcatggaaagcccctctgatgagatgacgtataccaggagatctgaagaaaggaaacaagccatgtggattgcggggtgagaggtagggtagagaagggaaaaccaagtgaggaatggcaaaagcaaaggcctcgaggcaaaacatacttggtgaggctccctgaagaacaggtggaagtgtcataccacttgtcatttaaatgcaaattacactctgcagtcaggctcactgccttccccctcctttaaaaaaaaaaanatccatccatccatcaattttattctttgacaaacttaagactcagttactttttactttttataacaagtattcatcctgaaatgaaattcctaaatacacttccttcataatactgtactgaatacatataggctaaatactccctacatagatttaaaaaaaaaatcagtataatggcttatcagtgaaataaaggagaaatgagtaatttctatcaaatactacaaaatataaatacttgtacacaactacattttaaaaagtagtcaaaaactactataactgattagctgtgtgaccttggggaagctatttaaatttcccatacttcagtttactcacatggaaaatgagaataatagtttctaccttacagggttgttgtgaggattaaattagtgcatatacataaggctcttagaacagtaagtgctatctaagggtttgctatgatttctcttatggggagaattaccacaaaagtaacagtagcatgaaaatgaatacaggggtgttatgttagaaaaattttcctttttcctgatatgatgaatgattctttgaaaggtttcaaatgtaacaaagtgccaycttcacaatatacactattgctgcattactagaaaatttggtgtggattaaaaccatgtaaaaatatttaatacttatacgtaaaaagtagttgggttctaggctcagagaattataaatgcattttgttttttcacctatgtgaatagctgctgggactttttggaagttgtgtgggacacacagcaaacctccctggtgaaaggctgtcccatgtatcccaggacatctagcctccctggcctctgcycaccaagcaccaggagtactccccagtcactgtcccctgaaatttcctgaatgttccccagtgttaagaatcactgttctatttttttcaactgtcttcaactttgactcctcatccagggtggaggatctttgaggccagaaaagtatcttattatgtccctgtatttctcaaggtagtgtactattgccacaaaaagattgttggctgatgcagatgcaaaacatcaatatttttatactgattataggtgacaggaaaggacaagggttttcaccctcagcaaaatcatcaaaaacatttaaaacagattacatatagtagataatactccttgtcttaaaacattatgcagaaacacacatacagtttcccttccctctaaaatctgcagcctcttctccctgctgaatgtgagtgatggtcccttcattcaacagacttctatttggcaactattatgtgccaggcattctaataggtgctggatgtgaaaggatttaacttattcaaataagtccctaatttgctgcaataagggagattatttaatcatattgagtaaaaagtaccaaggaaagtttccatatttctagggaataagaaatcttttcaaaaatctctgagccaaattaaaattcatttcattttccctaatctccatttctaggagactagaatctccttcctattgccacggtagctgctatctgcagagagaatctagataatttagaagagaaatttgaatagagccagagagatacaattcttatagtcagacttggcttcaccaaatttaatgaagaaactttaataagttacaacatttactaggcacctactatgcacaaagaactttacatacctcatttctaatcttggcaacattctgataagataaatattatccctattttaacatgaaaagatggaccttcttacatattcaataacttgckccataggtgacaggattgaaatgcaaacccagtccttgctcttaatggtgtatgacagctcatcatataattaggctgatgcaaactctatgataaacagtatgaatctaggagtggatttgtttatcctcaatctttttgctaactttacagtgccttgaattaaagaatcrtggttactatcaccatggtcagatctctggacagggtgaggaagcaggtgcccacaggcagacagccctgccatatagtgagacacgcttatgtttgggagcgctatgtgaacaacacacagctgccctcatatgcagatgtaatgatgacgacacattcagacaaggaactgaggtccagaaaagttctgacaacacaacttgagggacagcgttacagctagagctcaggtttcttatctgtaatccactgctctcaaatgcccaaatgattttatatacatatatgcaagtgtgtttgttgaaatagaaaaaatagtttcttggcctggtgaagtgcctcatgcctgtaatcccaacattttgggaggccaatgcgggaggattgcttgaggccaggaggtcgagaccagcctgggcaacatagagaaaccaccgtctctacaaaaaatttaaaaattagccaggtgtggtggcatgtgcttgtagttccagatactactgaggtgggaggtgggaggtgctgaggtgggaggatggcttgaggccaggagtttaaggctgcagtgagctatgattgcaccactgtactccagcctggatgacagagcaagaccttgtctcaaaaaagaaaaaaaaaattcccataatgttcagttagttctctttttcagacttttcctagaaatacccctcagaatttctagaggccacttccctgctattccttgttttctcagtccttaccagatacccaagcaattaacaatctttttgaactatttcagtacatttcaggatatttgaaattctgctgatggagctgaactgctgatacattaacacatgctgtcattattgactttgtaacagaggtcaagagagaaaagatgcatttttgaatagggaaaaacaaaactaaattatggggaaactaaggctcagagaggtcaagttgtcttgctcaaggtcacaaagccagtagtaagtaacagggccaggatttgaacccagactgtctggtttcagagtactctaaattgccaaaaaaagaaaactatttcaggcattattttatatttagcctagagcctacataatagatccgttaatataatcaattctaagctgtatattatattactgtgtttgaaatatttaagaaatattgtttaaaataagtgtattagctcttrgacctctccaacataaggagttttccaggcagtagcactgtttgcagtaggacttacattattggaaaatattttatcctataatcaatctacatttattttacacctttcaccttaaaattaaaagtcgtggtagttattaatcaagaagcaaatctatataacgtggtctctcatatatccagtactgttcagcttgaacaaatgcaaatctaatttttaaatgtcccttgaagaattctgaggcaaagttaaacttcaagtattaaacagaatagccacagaaaactagtgtttctcagcctccctttgctttcaaatgccttaaaaatattttagaggcagacaataatctagaattgattcataaccaatattttacataacagaatgttacatgtattttcatattataaaaactatactttctttgattaatgctagtattctgaaaacatcgttagtgccagtaaatccactaaatctgtttgtatttactgccctctagtgataatggctctacatttgattaagaaaaaactattcctttcagtaaatgaaaacatctcttgtaagttttatggagatttgagattaagaggaactccaggctgcttttttaaaaccaaataatcatctgaacaagctgagaatcgttctctaaatgatcttattttaatttttttttaacaaaaaagtctcatttaaaatagtaaacacctgcaacatgtatggagaaaggaaaccatttttgctaagaggctccttgaagctgaaataacatgagactgatctgatagctgtatttatatttctcttctacatgggctaactctcttattagatgttagcatagtattctgtaattgttgatacagtttgaattcatatatggtagagacagagttttgtataactatttagtcaatttacctaaaaccagcagcagcagcatatctactacagacttttgtttcactgaagaataatcatgacaataaatgggtgcaaaaacttcacataaatgaagcctccacaaaaataatcttgtatgaaaaagtattgtctccttatagagaaaattaggatctccaattcacttaaattggcctaaatgaataccataatcatcataaaatagttactaatgtcccctctgtacttcgtggtatgctttgtggaaacaatttaaacaaagagaatatctgtctcctaaagtaataataactagtgtaaataggcatgcttccagaaatatataatcttttacacatatcactttaatatgtgcatcttaaaataattttaagtaataaaatttgagctataaaagagaaatgatattcttttcaacaaagaatgcttgaacaattgagcatccactcataaaacaagaaacttcaacctttatcctgcaccacactaacatctacttgaaatgaatcatagaactaaatgtaaaatctaaaactaaagaacttctagaagaaaacacagtagaaagtagttgtgatcttgygttaggcaaagatttcttaaaccacaaaagcatgaagcataaaataaaaaatggtatactggactttaycaaatttctctttgaaaaaaactgttaagaaaayagaacaacaagccacagacttgagaagggaatatgtacaaaatgcatatcaaataaaggacttgtatccagaaattattttttaaaaaatctttacaacacartaagaggacaatccagtgaaaagatggtcaaaagatttgaacaaacaaacacttcataagaatcaaaaagatcaataagcatgtgaaaagatccaygaccatcattagacattagggaaacaaaaagtaaaaccacagtgagatgccacaytacatacttactagaatgtataaaatacaaaatacaaacaatacaaaatgctggcctggatgcagagcaaattaaattctcatacattgctagtgagaatgcaaaatggtatagaaactttggaaaaaggtttgacagtttcttataaagttaaaaagtagagtgaccatatgacccagcaatcctacttctaagtatctacccatgagaaatgaaaacatatgtctatataaagacctatatgaaaatgtttatagcaactctctatagcagaaacccagaaacagttcagatatcagtcaactggtgaatgggtaaacaaattgtgtccataaaatgacatactggaaaaaaatgaaatactaaaaagcaataaaatgaaacaaattaccaatagatgcaataacacaaaatgtattataagtgaaacttataattcaactcaaaactcaaaagtattgtaagtgaaagaagccattcacaaaaggctatatctttaatgtattattcattctggcaaggcaaaaccatagggacaatcagcactggacgtggggtttggggaatgactataaaaagcaagagaaaactttttgggtggtataaatatcctatattatatagtacatatatattataattacacattacctatatatctagattatggtggtggttatccaattgtacacatttgtgaaaatgcattcaactatacctctagaaagagtaactcttatgtaaattatacctcaaaaatctaactttgaaaaatattagctgatgttatcaaattatttcaattccagatttgcttaactttacaactttgcccaaagataaatgcaaaacaaaaacctcaggcatagttatgtatgataaaacaccatttttaccctttcaaagagctccaccattatttcccagaaaayaggcatacagttatccaaggtccacattagctttaatgatacaacattcagtgaattcccagttgtgaaaagcctttaggttggcagggcgctgtggctcatgcctgtaatcctagcactttaggaggccgaggcaggcagattgcctgagctcaggagtttgagatcagcctcggcaatatggtgaaaccctgtctctactaaaaatacaaaaaattagcagggtgtkgtggtgcactcatgtaatcccagctactcgggaggctgaggcaggagaattgcttgagcccgggaggcagaagttgcagtgagctgagatcgcgccactgcactccagccggggtgacagagattctgtctccaaaaataaaataataagagaagcctttaggtgataaaataatagtcaaagtattcttttaagtattattattttatttttttttaattctttgtaataaaaagttccataaagtaaaatattgtccttttttgttttatttttatttgtatcaattcaaggggacaggtgcagtttgttacctggacctgatttttaaataaatcaaactcagtttagttatttcatggtgatcctgggagactgtttgtcagtcatcatcgaatagcgaatgagtatcctttgtatgctcattctaggctgtaagtaccatgtcagctgatggagacacaaaaatccaataaagtaggtatagctgggggaggttccaagatggccaaataggaacagctccagtctactgctcccagcatgagtgatgcagaagacgggtgatttctgcatttccaactgagctttgaaaagagtagtggatctcccagcatgaagtttgagatctgagaatggacacactgcttcctcaagcgggtccctgacccccgagtagcctaactgggaggcacctcccagtaggggccaactgacacctcatacagccagatgcccctctgagatgaagcttccagaggaaggatcaggtagctacatttgccgttctgcaatatttgcggttcggcagcctctgctggtgatacccaggcaaacagggtctggagtggacctccagcaaactcgaacagacccacagctgagggtcctgactgttagaaggaaaactaacaaacagaaagggcatccacaccaaaaccccatatgtacgtcaccatcatcaaagaccaaaggtagataaaaccacaaagatggggagaaaccagagcagaaaagctgaaagttctaaaaatcagagctcctcttctcctccaaaggaatgcagctcctcaccagcaacggaacaaagctggacagagaatgactttgacaagctgagagaagaaggcttcagacgatgggtaataaacttttccgagstaaaggaggatgttcaaacccatcgcaaagaagctaaaaaccttgaaaaaagattagacaaatggctaactagaataaccagcatagagaagaccttaaatgacctgatggagctgaaaaccatggcatgagaactacatgatgcattcacaagtttcagtagccaattccatcaactggaagaaagggtatcagtgattgaagatgaaatgaatgaaatgaatgaaatgaagcaagaagagaagtttagagaaaaaagagtaaaaataaatgaacaaagcctccaagaaatatgggactatgtgaaaagaccaaatctacatctgattggtgtacctgaaagtgatgggagaatggaaccaagttggaaaacactctgcaggatattatccaggagaaattccccaacctagcaaggcaggccaacattcaaattccagaaatacagagaatgccacgaagatactcctcaagaagagcaactccaagacacataattgtcagattcaccaaagttgaaatgaaggaaaaaatgttaagggcagccagagagaaaggtcgggttacccacaaagggaagcccatcagacttacagctgatctctcagcagaaactctataagccagaagagagtgggggccaatattcaacattcttaaaggaaagaattttcaactcagaatttcatacccagccaaactaagcttcacaggtgaaggagaaataaaatcctttacagacaagcaaatgctgagattttgtcaccaccaggcctgccttacaagagctcctgaaggaagcactaaacatggaaaggaacaaccagtaccagctactgcaaaaacatgccaaattgtaaagaccatcaaggctaggaagaaactgcatcaactaatgggcaaaataaccagctaacatcataaagacaggatcaaattcccacataacaatattaaccttatatgtaaatgggctaaatgttccaattaaaaaacacagactagcaaattggataaagagtcaagacccatcagtgcgctgtattcaggagacccatctcacatgcagagagacacataggctcaaaataaagggatggaggaagatctaccaagcaaatagaaaacaaaaaaaagcaggggttgcaatcctagtctctgataaaacagactttaaaccaacaaagatcagaagagacaaagaaggccattacaaaatggtaaagggatcaattcaacaagaagagctaactatcctaaatatatatgcacccaatacaggagcacccagattcataaagcaagtccttagagacctactaagagacttagacttctacacaataataatgggagactttaacaccccactgtcaacattagacagatcaacgagacagaaaattaacaaggatatccaggaattgaactcagctctgcaacaagcggacctaatagacatctacagaactctccaccccaaatcaacagaacatacattcttctcagcaccacatcacagttattccaaaactgaccacatagttggaagtaaagcactcctcagcaaatgtaatagaacagaaattataacaaattttctctcagaccacagtgcaaagtagaagttgggattaagaaactcattcaaaaccactcaactacatggaaactgaacaacctgctcctgaatgactactgggtacataatgcgatgaaggcagaaataaagatgttctttgaaaccaatgagaacaaagacacaacatactagaatctctgtgacacatttaaagcagtgtgtagagggaaatttatagcactaagtgcccacaagagaaagcaggaaagatctaaaattgacaccctaacatcacaattaaacgaactagaaaagcaagagcaaatacattcaaaagctagcagaaggcaagaaataactaagatcagagcagaactgaaggagatagagacacaaaaaaaccttcaaaaaaatcaatgagtccaggagctggttttttgaaaagatcaacaaaattgatagaccactagcaagactaataaagaagaaatgagagaagaatcaaatagatgcaataaaaaatgataaaggggataccaccaccaatcccccagagatacaaactaccatcagagaataacacctctacacaaataaactagaaaatctagaagaaatggataaattcctggacacatgcaccctcccaagactaaatcaggaagaagttgaatccctgaatagaccaataacaggttctgaaattaaggcaataattaagagcctaccaaccaaaaaaagtccaggaccagacagattcacagctgaattctaccagaggtacaaagaggagttggtaacattccttctgaaactattccaatcaatagaaaaagagggaatcctccctaactcatttgatgaggccagcatcatcctgataccaatgcctggcggagacacaacaaaaaaaagagaattttagaccaacatccatgatgaacatcgatgcaaaaatccttaataaaatactggcaaaccaaatccagcagcacatcaaaaagcttgtccaccctaatcaagtgggcttcatccctgggatgcaaggctgcttcaacatatgcaaatcaataaacgtaatccatcatataaacagaaccaaagacaaaaaccacatgattatctcaatagatgcagaaaaggcctttgacaaaattcaacaggacttcatgctaaaaactctcaataaattcggtattgatgggatgtatctcaaaatagtaagagctatttatgacaaacccacagccaatatcatactgaatgggcaaaaactggaagcattccctttgaacactggcacaagacagggatgccttctctcaccgctcctattcaacatagtgttgaaagttctggccagggcaatcaggcaggagaaagaaacaaagggtattcaattaggaaaagaggaagtcaaattgtccctgtttgcagatgacatgattatatatttagaaaaccccatcatctcagcccaaaatctccttaagctgataaacaacttcagcaaagtctcaagatacaaaaccaatgtgcaaaaatcacaagcattcctatacaccaataacagacaaacagccaaatcatgagtgaacacccattcacaattacttcaaagagaataaaataccaaggaatccaacttacaagggatgtgaaggaccttttcagggagaattacaaaccactgctcaacaaaataaaagaggacacaaagcttatagataggaagaatcaatatcatgaaaatggccatactgcccaaggtaatttatagattcaatgccatccccatcaatctaccaatgactttcttcacagaattggaaaaactactttaaagttcatatggaaccaaaaaagagcccgcattgccaagacaatcctaagcaaaaagaacaaagctggaggcatcatgctacctgacttcaaactatactacaaggctacagtaaccaaaatagcatggtactggtacaagaacagagatataggccaatggaacagaatagagccctcagaaataataccacatgtctacaaccatctgatctttgacaaacctgacaaaaacaagaaatggggaaaggattccctatttaataaatggtgctgggaaaactggctagccatatgtagaaagctgaaactggatcccttccttacactttatacaaaaattaattcaagacggattaaagacttacatgttagtcctaaaaccataaaaaccctagaagaaaacctaagcaataccattcaggacataggcatgggcaaggacttcatgtctgaaacaccaaaagcaatggcaacaagagccaaaattgacaaatgggatctaattaaactaaagagcttctgcacagcaaaagaaactaccatcagagtgaacaggcaacctacagaatgggagaaaatttttgctatctatccatctgacaaagggctaatatccagaatctacaaagaacttaaacaaatttacaagaaaaaatcaaacaaccccatcaaaaagtgggtgaagtatatgaacagacacttctcaaaagaagacatttatgcagccaacagacacgtgaaaaaatgctcatcatgactggccatcagagaaatgcaaatcaaaaccacaatgagataccatctcacaccagttagaatggcaatcattaaaaagtcaggaaacaacaggtgctggagaggatgtgaagaaataggaacacttttacactgttggtgggactgtaaagtagttcaaccattgtggaagacagtgtggcaattcctcaaaggtctagaactagaaataccatttgacccagccatcccattactggatatatatccaaaggattataaatcatgctgctataaagacacattcacatgtatgtttactgcagcactattcaggatagcaaagacttggaaccaacccaaatgtccaccaatgatagactggattaagaaaatgtggcacatacacaccatggaatactatgcagccataaaaaaggatgagttcatcatgtcctttgtagggacatggatgaaactggaagccatcattctgagcaaactgttgcaaggacagaaaaccaaacaccgcatgttctcactcataggtgggaattgaacaatgagaacacttggacacaggatgggggaacatcacacactggggcctgttgtggggtgaggggagtgggagggatagcattaggagatatacctaatgtaaatgacgagttaatgggtgcagcacaccaacatggcacatgtatacatatgtaacaaacctgcacattgtgcacatgtaccctagaacttaaagtgtaataaaaaaatwaaaaaagtagatagtcccaaccgctgtattctttttgaatccttttgccactgtttcatatcacagtttttttttttttctgagccctagattatcagtctgttctttttttttttttttttttttaatgtagtccataggaatctgctgcctcacrgtcagtatcgtgccccttaccccaattctaatatgacaggtttttgtctaagacagcatttcctagaatgtgttgtaatgtacagcagcttcatgtgataattctcaaagactcccactgtcaaatgttagcatattcaaggctctgccaggacctgtaatacatattctttctttattctgtttaacttagcatttctgaaacctatcttactactgaactcttgacatttattaacaaacaaatacaaacraaaataccagggttccaagtaaaattcttatataaagcaaagggctttaaacatcagagttttttagaatggttattcactcatgcactcaacaaacacttattacatagtatgtgccagcataggggatacagtaataaacaaaacagacaagttccctgttcatgtaaaccttggacttatggggcaaaaagacaataaayaagcagacaaaaaaaaattacaaacactctcaatgaaggaaaagagggtaacatcgtacattgatgggggactataaaattaagtagtaaggaaaagctgcacttgagaaggtggtatttgggaagagactcgaatgcctagaataagccaaccagatttggggcacagcactctcaacaaaggctgagtaacacagccagtctgagggaggacaggtctacggaatgagagccgaggcaagtcaaggcaacatcacgtgggtcctgagggtatgagccttccagagggtgtgaggataccattagaaggttctgagcagggaatgataggatgtgatttacattttgtaaagctgtctctgtagaggatagtttgtaaaagtgcttgaggcaaaactgacaagacttgaagacttgcacaacagaactgaagaaatgagaagaatcaactcctagacttctgggatgatcaatgtctaggatggacattggtgccatttgcaagatggagaagaccgggggaggtacggatttaaaggagggtatgtaaggagaaagaagaatcctatgagacaagaccagaacatgtaaatacatgaagttttggatttcttactcttcaaagacattttacctcctgtccccgaagttcttcacagagttcaggataagaaaagctgccagacagttgagttttgaataagtagtaactttcaaacacttgaaagacattatattagaatagactacatccatcaaaatanttaaaaatgtttttagaatagtccaataatttggaatatgaaagcctaagaaacttccttatccaaggccrcataatataaccaaaattagaatttagtactcctagttggcaatatttttatgaaattactgttttactaagacattttagaaatgaagactttactgaaggcaataataagtgcaattaaaagtggtacaataakaagacttctttttcatttgcaacaggttagtagtgtatgagaattatgagatgtaaaatagtgtagagcataggcttctctagttggcttcatgtgagttcgaatcttggccctgcctctcttaccagcaatgaaatatgcagcattttacttaaggatactgggttgtatggagagaatcagagttaaggttggtgatccagcagtgtcatgtgtcaggagctaataaattgtattgtgaccagaaacactgaaacttgttataaggaaagcaatctaattaaaacagctgcattaaaatttctacaatatcttcctaacagcttatgctatcaacagtttgtaaactatcagaatcacggatactggctgagaatgcttttggagatttcaaattggcataattttctcagaatgcactgatctgacaaatgtacagacaggcagacaggaatactaccactcttcatgaataactgtctgcctctcctggatttcttccatgttgtgtaagtctattacactttgggtgaatgtagctttagtacattgagttaatatcattcttgcaaagaagctctttataaattccttaaacttaatttgactctggacacaaacaaatgagaacaaaatacagctcaaggattaagatccttaaccaaatatgtaaaaaacacgaaaagccttacaaacagtgatcaacagttaaacatgcgctatcaccttcccctaacagctagggaagcatgtatatgaatggaacatatgaacttccatttggtgtactaagaaaacacatcacgcagatggcttttatagcttcccaaataaggttctaataattcacaaaagtgttgttccctaaaacccataataaacaataataaaacctaatgtttattgagggtctactatgtgtcaaggagagtcctatgtactctcctggaattacttcatttatttctaataataacctttaatgagcactgtcactcccgtttcacagatgagccttaaggtcttagctatcaactttgcagacaacacccaagtaaaatcctgccccctctttttttttttttttttaaccagaaatccagtcctgacaactgaaagcttatagggcatttccgcttagatacatagccttacctaaattatatgtctaaaaacttaactgtcatattgtccagccctcccccaatacccaactggcttctcttcatgattttccaactataattctgtccattattcaggtttagaatttcatgctttcttctggctgtggtcctgccaagtcttatgtatgctgtcacccttctctgtgcaatctttctcctactcattcctctcttttcatcactatcctatttcaggcccttatcactcttacacctaattccctaacggtttcttcttgctttcagtacaatttccccttgatataatctatcctgcacactaccaccagatataaccttctaaagtcaccttattttagtttcttcataatattttccttatagtcaaatgtaagggttcttcatgaattataggacaatgtgcaaatggcttgacctggcatttaagacagtctgcagtatggcctcaatctacatttctcacacctgccactggtcctataatcacatcctctgttccagagaggctcactcctccagaatgcccactaccctcctctccagcaaacatacaataaagcgaatccacatgaataccccatcctaccctgccttatccagcccctggaataccacctcttccctattagatgcctatataaatcctcagtattcaagatccagcttaaggagcactttttctgggaccaatcattctggtcctctgtattgaatactcgaactcctctacaggacaggaacataatgtattattaccctatcattcattaacacacaacaggcttacattatatggctggttgtattttcagaggtatgtctatatgtttcgctatctatctatctatctatctatctatctatctatctatctatgtgtttgaatacagatacataaaaatctcatttcacctataagaacctctggagcagatacatgtcatacaataattgggctaaaacaaaaatccctcagtgaaaacctaaagactgggttgtggttgtttgcagccaaaacgtacaaaatgaaaacctcctaacgatttattttccacatgaaattagtaccagatctagagaaaaatggacaaggatcaaatacaaataataaagtcatcaccaaactaaaaatttcattcaaaagtgatgatgttggccgggtgtggtgactcacacctgtaatcccagcactttggaaagctgaggtgggcagatcacttgaggccaggagtttgagaccagcctggccaacatggtgaaaccccatctctactaaaaacacaaaaaacagctgggcgtggtcatgcacctgttatacccactactcaggaggctgaggcaggagaatcacttgaatccaggaggtggaggtggcagtgagccgagattgtgctactgcactccagcttgggcaacagagcaagactccgtctcagaaaattaaaaaaaaaaaagtgatgatgtcagtaaagacccaaatcagggtcatatgtttaacaccagaaagtttgtatttgctacaagacagaaaccttgacaaaataacttttctgtgctttgttacttcatctgaatgaagaaggtaaaccagttgatctcacaaatctctttctaagggcttctggaatttttttttttttttaaacaataaaaggaaagagacttcycttaagcagaacaaagtccgactcctctgtaaagtggctgacagcaagtggaaaatggaagaagaacaattacctgcaaaatgactcattcccttgtaacaactacactactagggaattccttctcttaccggctgtggctagcgtcagactcatgacaaagacctcatcctggggctagaactaggtttagggttttctcattcattcctctgtttctcagctgcattttcatttttaatctgtgcaatgattacagaggcctatgtttggttttcatttctagtttccccaggaagagacaactactatcttgatattgattaacacttgaaacttctgttaatcacaatttcagtatttcagggaatcagagaaatcatttggaagagccttgaaggtcatccagggtgagagaaaagcaaagcacaagcaacagaccaatgtttagacacagtgaagtgaagrcctacaggagaccctctcaacttcaataagagtcttttttatggctgtcttcatattctttcaaagaaatcataataaaggagttagtgagagtgtaaataaaaaataggctatcatagagtgctgggtaactgagctaaaactaaagtaaacaaactcagtgggccatcacatatgcaagctggtaaggtctcataaatcaccatgactgggtattgggatttcaaaggcacactctgtaagctttctcccagccctgttgattcaagctccaattgcactgggttacttatatggcagcatataaagttgaccttttaygtttaaaaatagttccattcctcatccctcctaaggataggccacagtacctatcatatgtccccaccacactacataatttatgtaagttttcacttaattttcaacacaatcctttgaggtagattatgttagtcctsatttacagggaaaacagaggctcagggaggccaaatttatttatttatccaaggttgcaactctactgtagggcagatttatatccagaagaggaattgcaaagctcctcagaatttaggagatttaaaatggaatcaagataaaggttcacatttttcatcttctattccattttactcttccagcatctaataataacctatgatatattagaacaaatcagcccatacttattttgacagtctcttttcaccccatttcagtttgtaccttgctgtctcagagcccatcaaccacctttcctcactcccaggcagccggtccttcaggggatggcttggcagttggcccaccatcctctgctaccagggcatgactcatggaggcaacaggtgaagctgaygccaactattagtgctaaaaaagactcaagcctcatgaaatataccatccataaatcgctctccagtcagctctacccctccctccatttctacagctgactgtctgttcttccttaaacatttacatccgccactgacctgtctgggatttcttttttacttcaaggytctcctaaaggttcagtmcaaccaggtttcaccaaatgaaccctgcggtggaaaggggcagcaacgggcattggtcagtttgcctccagccaaggaaagtctgactcccctccttctcccactcttctctttctctgcctcacactgcctaatacgtctttcctctttctctctttctttccttatatcttcattttccaccctattcagaagtgaaacttcccttgccactttgcccccactaagaaaacagacctccaacacaacctcttaayaggctaattttaaaatcatgaacctgcttacaccttccgtgagtttatcctatatcttctctatctgctgtctgcttcccactaaggttttatccctccatcccacctccaaatcctttacagctcagattctcasatctgctttagtcacttggtctcctcatcccactgaccctattatccttctgtgcacatgttagagggcacatgctcctcctaggaactagggccaggtcagttatgctcccatcctgacatgacctagagaacaaaaaaggcaaaacgaggtactgtaggattcctctctaggaattatactttgctgaaattgctcttgctattttggaatctagtgctcactaaatacatttttaaaatattatttggatatattttgaaaatacaaccagaggtcgggcacagtggcttacgcctgtaatcccaacactttggcgggccaaggtgggcagattacgaggtcaggagttcgagaccagcctggccaacatagtgaaaccctgtctctactaaaaatacaaaaaattagccaggcgtggtggcaggcgcctgtaatcccagctgcttgggaagctgaggcaggagaattgcttgaacctgggaggagaaggttgcagtgagcctagatcacgccattgcactccagtccaggcaacagtgcaagactctaactcaaggaaaaaaaaaaaagagagagagagagaaaatacaaccagagaataaacacttgttcttctatctctccatcttccccaccaatacaacatccagaaaatagtcatctttacacttatttagaagcacatagatcttataaaastttaactgagcattaggttttcatctttaaaaatattctgaggctgggtgcactggctcatgcactttgggaggccaaggcaggaggatcacttgagcccaggagtttgagaccagcctgggtaacatagtgagaccctgtctctacaaaaaaaaaaaaaaaaagttaaattaaattaaaaaacagaaaagccggtctggtggcacatgcctgtggctccatccactcaggaggctgaggtgggaggatggcttgagccagggagatcaaggctgcagtaagccatgatggcgccactgcactccagcctggttgacaaggtgagaacttgtctccaaaaacaaaacaaaacaaaaaacgttttgacatgtagaatactgtttctgggactaaattagagatttaaggtttgaggtatgagaaaatacctggaatcatgccttacattagaaggtaaggtaaatactggtgtttcccaatgagttgtagtcagattgttcatatgtatcaaacagacaatatactgaaatatttaaaaataaggctaaatagcaacaaataatttttcccatgaattctactttttttttttttttttttgagatggagtctcactcagtcgcccagactggagtgcagtggcgccatctccattcactgcaacctctacctcctgggttcaagtgattctcctgctcagcctcccgagtagctgagataacagacatgcaccaccacacctggctaatttttgtatttttagtacaggccaggttttgccatgttggccaggctggtctcaaacttctggcctcatgtgatcgacctcccaaagtgctgggattacaggtgtgagccaccatgcccagctgaattctacttttttttttttttttttgagacagagtcttgctctgtcacccaggctggagtgcagtggcacgatcttggctcactgcaacctctgcctcctgggttcaagtgattctcctgctcagcctcccgagtagctgagattacagacatgcaccatcacacctggctaatttttgtatttttaggagagacgggatttcaccatgttggccagctagtctctaactcctgaccgcgtgatctgctctcctctgcctcccaaagtgctgggattacaggcttgaggcaccacgcccggctgctgaaattctacttttgaaagaacaaattccccttctgtagggactgatgattcagtctgtaatgatgcattctcttcatcttctttttttgtcttttcttctatatatcctttaggcattctactgtattaacactagatagaaaaattaagatttaggcccaaacattatcttctggcataaagtaaactaatcktttcctgatgtacaataaataaacagacatatttctagtagaagattccttatgatttatcaaaacccaattatcacttacccttatggagatcttagatcttagaaaccatactgacaatataagattaagaaaacaacagaaaatcaaaatatataccaaggataatgttaataggtttcatccttatcacagcatactgttgaaacttacttgaaatatttttttaaaaaagatacaagaggacaagtgtttagtttttaacaagggaggggactagtcaacaaayattgattacctaatttatgaacagctctggccaaagtggtcaaaaaaaaaaaattaggactttagttttcctaaacctatcttaatttttaacaggattatagctttgttcaatctttacagtctttagcctcttttgtgaaatgggtttccttgtaaataataaaatgacacctatatatatttaaagcactcatgaaataattttatctctttattaaaaactgtgataacccttccaattttgaaatttattgtcttcctaaattcttgctacaaagcctatcattaatattgcagttcattttttccctaaagattgaaaaaaacactaacaaatataaagtctttatggtcaaagaatgtactccttttataaaacttggagttgatgtaaaggcacagacaacacaagttaccttaataataaatgcacttttctttgtaattttgggtaattcagtgtgatttgtaattcttttaaaagacacacaatcacttgtatttttgcatggttctttttttcctaatttcccactatagtgaaatatctgtttttccttctctattgggtttggattggaatgatcaggtagaattaaatgtaaaataacaaaaggaaaatactttatagatcttctcaaaatactttgaagggtataatctctttaagatggctttattcatatttaagccaaaaacaaaaagcaaccaaaacactactgtttatacaaaaagcagcttcaaaatcagccagttattttctgaaatggagatggcagacattagcctgcacttactccaatatggcagccgcatctttgcctctttgctatggacacatccccagcaggcctgtactttctactctccagacctgtttatgacaggccaaggtgtttcctattatggtgcctatggctgcacagtgcactgcttgtcagtaataaaagccagaggctgtccctatagggattacagtgcagcagaccagagatgctgatgggaatgcaagcatgccctaggcaaacattgcagaatactctctgacaggcaaaagccaacaaacacatcctttcttcccagactagcagggaaagtattcagttatgtcattttcacttggaacaaactaataagaagaatgttattgctaaaataggtagagatgagaaagagcagtttatgaccatgaatatggcctctatggtttttgcctgtgcactacaaacttttaatttaaacgagatgagattgatctagcatatactatgataaaatttctgagacatgagtatctaaaagcagaactgagattaagtgagaaatgctcaggattcctgtcactgaaagaaaaagaaaaaaacctttcttgaaaggcacaaagtagaatgctcagactctccatctaccaatacaaggtaaaaaacagcatttgcattaaccaacatcatgcattcttgtactaatttatgtgactaactacaaaatgttatattgacactcactgtgtagggtgtcaggatggccaagtggtctaaggcaccagacactcactgggttgggctaaaaacacygtagaagacctcatcagaacaataaaacagagacacaaaatattgtactaagagttaagagaattacaaataaaagttctgtggaaagtcaaaggtatccaattaggaaagcctgaggtgggagacataggacaccccagatataggatgggaagaagatgggattaaaaaaaaaggctttataaaggatgtaacattccagataggccttaaaagatggcttcgatcttttaaataaaactttttgttttagaacagatctagatttacagaaaacttgtgtagacattacagataattcctatatactctacactgtttcccatttttaatgtctgactttagtatggcacatttgtcacaattattgaaccaatactgatacattattattaaacaaagtccacacttcattcagatttccttagttttcacgtaatttccttttttctgttctggatcccatccaggataccacataatatttagtcctcatgtctcctgaggctcttcttggctgtaggtatctcaggttttccttgtttttgataaccttgacagttttgaggagtactggtcaaatactggtcaagtttcgagggtagaatatccctcaactgagatctgtctggtatttgcctcatgattacactggggttatatgttttcagtagggaaaccacagattaaaagtgccattttcatcagatcatatcgagggtacatgttatcacttatcactgtcaatgttgaccttgataacctggctgaagtagtgataggwttctccactacagtttcttttttttccctttctacactgtactgtttagaaggaagtcaatatgcacagctcacacttacggtgtagggggttatgttctccctccttgagagtagagtatctatagaagttattgggaattccgcacaggaggagatttgtctattttcccccacttaggtatttatttaataaattgtatcaatatgggtttatggatatttattttaccctttgggatataatccaatactatattattttcttgctcaaattgttctagctttggccattgggagctctttcagtttgctcttgcaactcttcagtatattcccacgggtgtagggttccatttgtttgagcaggtccttactttttggcactacaagatgctccaggctcatcttacatatttccttcctgagtccctagaaatcagctattttttttcaaagagtcttggttccttttaccagagaatggtattagaaaccaaaatgagggtgctaagtgtgctcattgctactggggtatggtagcttctagaccctctcggctgatagagcaaggaaatatttgtgtgtatactagatggtaagatgttgagaggtagaatggagagttaccttcttaatatacttttcttaatattaaatattaataagatattgtgtgcctgggttactttcagtcttatgcagaggaagaacgtatgtacattcatttatgaaaaacactggctagactattcttctgcactgcattatgcatttctgctagaaaaagctcagagattttcagatattctgacaaaaatctcaggcttgcttgatgagctatactgtaaaattacagaaggaaacaaagggcaaactccttgaaggatgaaaataaaggaataaaacatataaaacaccaccaaaaaaagtgattaatgggggagaagagtaaataaaacattataatagtcctctttggttagtatcaatattattaggtcactttatcaaaaggatagaaatcaggatggcagacacccttctctaaccctcaccccccaaaataataaaataaaaactaatgttattccttcacatatggaaatgaatgagttctactgagtatctagtatgattcctgactcagtcgagacaattcccatcttttaattcattaaatcaccacagcaactatttaacagatgagaaaactgaagcacagaaggcaacrtggcccaatttacgtttggtaaaaggcagagaatgaatccaattcaggcaggctgtctatagtagggtgctctaaatccacggaccattctgcctaaggaatgaatattttatgaattggaatatttctgctgaacgaatttgccattttctcctctagtggagaaatccaactgagggtaaagaaggaaaaatgttgattgtttaaaacaataaattagtctctaaattgttcttgcagctgatttagactagtgtgtccaaaagtatgcccagtgttagtaaatggtaggcaaaatgctttaaggtggtgcaagatgaatgttttctcattttgttattcattaattttagaaaaaatacagaaaaaatataacttgaacatcaaacctatgatttcatgtataccattacttaagatgaggcacttgggtgagtatttagatttaacaataagttgctcttagcatttctatactttgacaataaattatccaaaaaagaaattaagaaaataatcccatttgcaatagcatcaaaaaaatacttaggagcagccaggcgtggtggctcactcctgtaatcccagcactttgggaggccgaggcgggcagatcatgaggtcaggagatcgagaccatcctggctaacacagtgaaaccccatctctacttaaaaatacaaaaaaaaaaaaaggcaggtgtggtggcaggcgcctgtagtcccagctaattgggaggctgaggcaggagaacggcgtgaacctgggaggtggagcttgcagtaagccgagatcgcgccactgcactctagcctgggcaacagagcgagactccatcmcaaaaaaaaaaaaaanaaaaaacttaggagcaaatctaaccaacaaggtgaaagatctatacactggaaactacaagacattgatttaaacaactgaagaagacagaaataaatgaaaagatatcccatgttcatgcactgaaagaattagtaatgttaaaatgtccacactatccaaagccatctatagattcaatgcagttcctctattgattcaatgcaattcctttcaaaattccaatgtctttttttttcacagaaatagagaaaaaaatcttaaaatttatatgaaccaaaaaaagacctaatagccaaagcaatcttgaacaaaaagaacaaagctgcaggcatcatattccctcatttcaaaatatattataaagctactgtaatcaaaacagcatgttattgacataaaaacaaacatcaaccaatggaacaggatagaaagcccagaagtaaatccaagtatttacagtcaattgatttttgacaaagggtccaagaacacacaatggagagaggacagtctcttcaaatagtgttgggaaaactggatgtccacctgcagaagaaagaaactgtactcttatctcacactccatataaaaatcaactcaaaagagatataaaggcttaaacataagacctgaaactgtaaagctactagaagaaaatataagggaaaatctccacaacaatggtctgggcaatgatttcttggataggactccaaaagcacaggcaactaaaacaaaaatagacaaataggactacattaaactaaaaagtacctgcacaagcaaccaaataatagagtgaaaagacaacccatggatcaggagaaaatatctgcaaaccatacatctgataagaggctaatattcaaaatatataaaaaattcaaacaaccaaatagtaagaaaacaaatcgattaaaattagrcaaaggatctgaayagacacactttcctcaaaaaagaaatatgaatggccaacagagatacaaaaaaaaaaaaaaaaaaaaaaaacaatgttccccagccctgcacagtggctcatgcctgtaatcccagtgctttgggaggctgaggcaggagatcacttgaggccaggaattctagacaagcctgggcaaaatagcaagaccctctctatacgaaaaaataaaaagccaggtatggtggcacacacctgtagtcctggctacttgggaggctgaggcaggatcattgagcccgagaatttgaggttacagtgagacatgatcaygccactgcactccagcctgaacaaaagagcaagaccctgtctcaaaaacaaacgaaaactcaacaatatctctaattctcagggaaatgcaattaaaaccacaatgagctatcacctcatgcctgttagaatgactattttccttttttttctcttcaacttttaagttcaggggtacatgtgcaggatgtgcaggatgtgcaggtttgttacataggtaaacatgtgccatgtttgcttcacgtatcatcccatcacctaggcactaagcccagcatccactagccattcttcctgatgctctccctgcacccatcccacccgccaacagaccccagtatgtgttgctctccaccatgtacaatggctatgttcaaacagatgaatgataacaagtgttggcaaggatgtggagaaaagggagcccttctacactgttggtgggaatgtaaattagaaccaccattattgaaaatagtatgaaggttcctcaaaaatctaaaaatagaactaccataaaatccaacaatcctacttctaggtatacacccaaaggaactgaaattggtacatcaaaaagatatttgcactcccatattcatttcagctttatttacaacagccaagatatggaagcaatctaagtgttcatcaagtgtgcataaagaaaatgtgatatatatatatatatatatatatatatattatatatatatatatatatatatagattatacaggccgggcgcagtggctcagatctgtaatcccagcactttgggaggccgaggcgggccgatcacaaggtcaggagatcgagaccatcctggctaacatagtaaaaccccatctctacttaaaaatacaaaaaattagtggggcgtggtagcgggcgcctgtagtcccagctactcaggaggctgaggcaggagaatggcatgaacctgggaggcggagcttgcagtgagccgagatcacaccactgcactccagcctgggctacaaagcgagactccacctcaaaaaaaaaaaaaaaaaaaaaaaaaaaagattacacagccttataaaagaaagaaattctgtcattcacaacatcatggaatggaactacaggacattatgctaagtgagataagtcaggcacagaaagacaaatattgtctttaataaatgatctcactttatggggaatctagaaaagtcgatctcagaaacagagagtagaaaggtgggttaccagaggctgtagaggaggagggagagagaaatggaagatgtcgatcaaacagtacaaaatttcagttagattggaggaataagttttagtgatctattgcactgcatggagaccccagtaattaataacgtattatatgttttacaatttctaaaatagatttttgacattctcatcacaaaaagataaattggtgaggtaatatagatatgttaattagctttactaaatctttctatgatgtacacattttaaaaatcacattatacccaagaaatagatacaattaatatttgtcaattaagaataattgacaaataaattttaaagattaataaaaaatacattaagttaaaacattcaacatataatagcagatatgaatgtacacagaaatgacaaaatcccagcactgtgggaggccgaggagggaggatcacgaggtcaagagatcgagaccatcctggccaacatggtgaaaccccatctctactcaaaatacaaaaattagctgggcatggtggcatgcgcctgtagtccagctactcgggaggctgaggcaggagaattgcttgaacttgggaggcggaggttgcagtgagctgagatcgtatcactgtactccagcctggcgacagagcgagactctgtctcaaaaatgacaaagtttgagcaacattaatttggactgtaaattcttaaagaatagaaaagtcatgtttttcttctaagaaatattatgtttttacattgcaagaaatatgtgacacagagtttttcttaatctctcttttttagtatattctagacaggcaagcacatgcaatttattgagcacccagtgtgtgctaatgcaccaaacggagctttacatacattatagctaatggtctcaataactttttcattttattttcccctttcattatcgccacttataaatgaaaaaactgagctccagagcggtaaggcctattgcccaaaatattagataggaaacaacagagctggaatttgaaaccaagtttgcctaatgaaaaacatttatgttcttttcactgtacaaagctgctgtaagtatcactggtgcctactccaggccagggagtaaatatcattcatccttatcacatacaaagtataacaaaacaaaaacaagaagctctgaatactaaataataataataaatactttataaaagataaactattctctaagagtaaaagataataaacctattgtcattgtagttggtcactgaacttaactaatttcctaatggacgcagcagaattgtttgttgtttaagcaaatatcaaggcataccccccaatccctgttacagggaataaaaaaagtcttcttcaaatgcctttcaaaactaatgtgaatattaaaataaagtgctactgatctctctacattctagaaagatctcagactaacagtgtcaattaaactattacaacaaatagccatgtaaaaactgctcccctactagagctacgctatcacaaaattaaccccagcaatctacagttctagaaaaagagttggtccctcctgctgaaaaagagaaaaccaaaccctacatattttgtgaatccactgaaaataatgacataaacagcactgcacatccatcatgtatttatatcttaagtgatagctacagtctatgtaactatcgcagaaatcttcttaaactgaacaaaagcattatctatcatcctttctctctagaaaaataccagtttgtttaatctacccataacattagaaaaaatacttcttttatcatgggcaatccttatgtttcggaatttttttcgaaaacgtagacagttcataatgctctcagacagaagttaccactactaccccaaatattaagtcaaaatgtaactgaaaaaaagaaatttatctagtaatgattaatttattgaataattaaaaattaggagtttttgataattaaatgttgggaataattaaactttcactaaatactggcacaggaactgaacggatgacaacagagacaagttaagatttgttttaatcctaagttttatgctaaggtaacatcaagggctctacttttcagtgaaagaaaaatttcctttaaaattgtttccctcttccattattacttaaaagcaaagaaagtattttttctaacagtgattataggattctcaatctttcatattaactttaaggtactacatgtaagctacataaatctttcccaaatctacctttattgagtagatgaaaaagcagatatcgaactcaaaacatctaaatgttgattttctataattatagaagatattttcttttgaaatttaaagtttgtatttaggcatattaacacttttttaatctaagatttaatatgttaatgtagaaaacaactgaggctgttttctctctataaaactaacatgccttttccaattaacttagtttccttcttagcaaaagtttaacatttatatctgttgagttacaytgtagttgcataatgtggaaatatcttaagatttagccacttctatgaagatcctatatttgttataacacccctcttgcccagaagaaaatacatcaacaaaaagtcctactatatgttctgcattgactattacaaagcagtagggggagcagccagagaaagctctgagacaaagcacccagcaaagcaatttaatttataggcaacagaaacatgctagagaggtttgccaaaagccaaatacacaaaataaattccataaagaagtcatgaccacatttgtaaagctggcctaagtatatttggaatgaagtatagaaaaatctgaagtctcttagaaagggtctggattctaacttcaagacagactttcagcttgaaacacagtcatttccagccatgccaaacctcaaactgcccccaaaattagagcagaaacaaaatacatttttatagtgatatgtcttgggaataactcaaaatgatttcgttttctcctttgaacctcactgaacttacagggaaggcctggtgaaatgtgcattattaggtcacaagaggataacgttacagggttccatagcataatccttgaaagccctgaggcccaggccgctgtcctgctctcctctctactgactcccatcctcaatatactttccatgagagaaaggtaaccaaaaacatggtgaaactattctgcttaaaaggtgttttactgaaaaggcacattgaccactaacccttattacatttcacatgttctaaaaattagtaaggtctgcattttcagttttagagtaaaacaggaaaagtacttagttagctcttctgtctggcattctgtaactggaatttaagaaaagcctaaacttctaattagaacttcagaatgttcatgtctgtattataccacaaaaactgtaaatataatttaagcatttttatgatacagaaatgtgcgctatagacagttatctaagaattataaaaatccatcaaacttgaagtgtctggtataaattacaaccgaatggtaaaaagacattttagccacgtaggcaaccaatgaagtttgacctaaaacccaaataatagcaataacaacagatacagtgcctactattgtcagatactatattagctagctcttttgtatatattctttkgaactcttacactgacttttcaagatagttattatggtgcccattgtatgctaaggaaactgaagctaaaaaaaattgaagtcatttctctaatgtaactccattagcaagaaacaaaaccataattcaacttccaggtttgcctgcctccaaagctttgagacctcactaaaattaccctcaattgtagcaatgaggttccaaaggaaatctgtacaaatctcaggcagattaatgtgcttataagggtaaatgccatagatttaatcactcaaattaaatgccatctggaatctcttaccctacttggtacaagcatcctacatgtgttacagccaaccctagccttggccaagaattcaataattttyctgcttcaatgccatcaacaagcaagaaacatatataataccaatacaggaaatacagctagttgctcctagagcatcatttaaaagctgctaattggctaagatgccttttattgagaagtctaagaaacagaaataatgtgttaacccagtttgttaaatgggtttgaggaatcagtttcctccttcctaatacctaaatccatctccataataagtattctctatcaccatttaaaaatcctgatctcttactagtgtttttattgtgcttttcaatctrttagagtaaattttttaaaacctcaagagagaacacagaaaactgtcataatttttcaaaggctaaaggagaataaactgaaaatatcagtttgaacacgtgtatgtaaaaagaatggatggtaataaaactaacaactgaaaagcaatgtttctgactcattcattcatactcaagaaatatcaaataactgagtggagatgatgcaagctgtacacatttccagttcagactgaaggtgtggcaacactcacaggggccttccgatcagctgctccaactcagtttacagcttttgtggatgtggcttattcatgcccttgttatgaagaagaagggtaactttacaacctttagcaagagcttttttttctttctgtgctaacccttttttgtctataacagtcatgtaagcttagcactgatttagaaataaataagttaaagaagacacgaatggcttggacattaaaagtttaagcaacagcttaagctgagctaagtttaatgttaaaaattagtgtgacagcaataatttttcaattcagctctgtcgtgggctaggaaaaaatatcctaatttttcagccacaagacataaacattgctagaatgactacattttgaaaaaattatcttctcactttacctagatttcattttaaccaaacagaccaacctctcctattaaacctgtaaattaactcaaagtctaatctggggccttcataataaagattttttttttaaatccctgtcttatctggtgcctttaaaagaaaggaatcattttaggcaattattatgacctaaaaaatttttaaatcttaacgtatagattaattccttgacagctgaagtcatttacaatacattattaaatttcacattcagttttaaatccaaacatagatctcaacattaagaatatggattttagggaaagyaactagctgctcaaattcatttagctgaaaaactactgtcgaatcaccttgaaaayatacactaatgcttgcacattgctaagkggcttttgattctgctcttcattttcttacacagmatcaaccacacaatagaattaagaactcaggcccatggcaaagtgctcccatttagcagttaggacactggacatattcagcatatgtctactgctattgagaatcaaattatgaaaacaaactatattttataaaactaagaatttgttactcaratgagaataaaggtgcctaatgcyacagcagggggtaaaagtcccagtaagagagcaataattggtcattctgatgaggagctgtgccaaatttagaaatgaggcacaaatgacaaaaaaattgatcatcagtgtggacatgggtaggtcagtgtgcatatgggtaggttagtatctgctggccgtgtctacagagccccttttatttatttgaagccaacttttcacttgacaatgctacctacaaaagcactgttaatagataagacaatcaagtggctgttatgccgtggcctttttgtaaaaactgcatgagaacaggtgggataaaaaccatagaaaggtagaaaaaaaaaagcatcactcatttaaagatatgtgcacatagatgaactgtaagataatataaccttcttgaccttgtaaataggtggccaaaaatacttaaatatctkgacgaggcaactattactaattgtctcacaacattaycagtccttactggctgaatccttcagccatctgcatacgacatgcacaggcaaatagccactaaaaacatacacaattccaattatctccttgcataactaaagacaaaaagaacaggaaatccaaaaaatacagcaaaactgaaaacactataccttgccttccgtgctattttaaggctgtcccaggctgaaggttacttctcagccctcaaaactccattaactgccaagaccagcaccttagcacatatggcacagatgcctagttgaagcctccttgtactaaatgacctcaaaaaactgggctttctttccaagattaatggaaacaaaagtaatgatcataaggaaccttctaactctgttaatgtttcctgcggatatgtatggccaactgaatatataaaggctcagttcttgcggggtaccctgacaactagatgaattagggtgaaggttccaagttcgatgaactcttctgagtttgagtgccctaggtggtgacattcaagtgatttcacagacatccaccaattcttattttcaaccgggaatcccaagaacacctttaaacatgcaatgcccatggaccctactgggtttctgctgcaagggctcagtgttacttaggaaccctgtgtcttgggagatacttaaatttagcacgtcaaattgcttttggaaaatgtttatctggcgtgactaggggaggcaaagcaaggaaacaggaacctccctctaaggagcagaatagccaacatgcagtaagcctaaaaaacctctcaatttatttcccggggctatgggtaccagtggctcgccggcatgggaatcrgcagcctgggggcaccagtgacagcagaaccggggcttaccttgttggaggccatctcactgacggagtgcctggtctgtagggtctctagctggtccagacaccagtccagctcctccagggtctcgctggccagtttctggtaggcctcctctgcgaagagacagggaaagggggactcagttctcaagcgcttcacgggtccgctagcgagttcaaagggggccatcctgccataccccgccatgctcggatgcccggtgccggcacatgagggctgctccttcatattgcccagcccggcagtgcaacgggggcggaggctgtgctcgcggggcggccggcctcggggaggcacggtctctccagcttggcgtctcgggtcggcctccagggagggcgtgcaaagagcggcgagccaactttcacacagcgacgcgagcggaaaaaccactatgcgacttttcaactgtgcggcgggcccgagtcccagtccaggagcycggctctagcggatggcgagggggtggcgagcgcgcttgggtgcccgccccgcagaggagcgtctggtccacagccggatctcctcggtccccaacccggagccgcggccccacgcccgccccgcctgccgagccttctgcackgcacttgaagtgaatgaatcagccgcggccgggtgcgcggccaccacgtttcctgttttctttctcaactcctcgggcggcaggcgcagcgcggctccaacgccgcagctttccgggaacactccccctcacgcccctctcggccctcggcgctgcctggctcctcctcaacccccttacgaaaagattccgaattgcaaaagcctgtccctgtccgtgccacccgccgcgtccttcccctcgagctctgccccgggggccccgccacctcgcagtgccatccccccggcgcagccgggcgccactcgctttgaagtgcagacgaggaggcgcgggcgcgagcgtgtgtgtctgtggggctgctgtgggactgtctgtgctaggagagcggcggaaaacccggcgtggagcgcctgcagtccgccgtccggggtcgcgcccgccgcggggctcaggagggaccggcacgcaggcgcgcacggccgcgcacctgtctcgctagaaccccgcgcgccccgccgagccactgccctccaggttgcccagaccgctggagcctctgcgactccacgaccggctgcttcctgcgaagtttcacaaacaaggttatttaggaccctcaaggtttctgagggtttaagttttagggtttctgggggttcgtttctaaaggcttaggattcacctacttcaaggaggcagggttgtgggaattaagaccgcattctttttctacccagcccagtccctactaagtaccagacttctaaatgttggggcggacagaaacaagcaaacaaaatatacaatgttgtggggtcggaacgctttataattcacaaatttgacaataggctgcattttcatatgccgaattgcctaagagttctcttaaaggaacagcaatgtgaaagaaccacatggtaaggagaatttacgcatgtcctgcatactactcctttcccctgtgaattgcataagacctagatgatcttgggccaaggaagaaaatctggaagggtgtttctacccaccatgtgcagagtacactacaattttgagaaaacggaaagaccatattcaaaggcatacagaaaagcctgttctgtttacaaaggctgacccagggcaccagggacactgtccctaagcagatcagttgtgggagaacttttctacattagcatgcaataagcaaaccattcatagtgaggagaagtcaaactcccaagggtccatttgataaaactttgtcattgtcgagtggaaagaagatactgagaaacttacactaagtggtgggatcccttgtctttgtctttgaatctacaggtattggagaagaaattctgcccttgaaatttagactccataaattaacatggcacaacaaataaagttcatggactgaatttaggctcctgggatttttgagatagctttttatgtgaactttgtaaaagttagagtaacttttaaagtagttgttacatgtgccacgtggcttattgttatcaagaatacttgaactatttactgttcactttgagtactctaggttaaaatttgcctcttttttgttctacttcctccaccccgcagtctatgtaaatatatactttagatggacaaacaactgcctaaaccttgccaggtgaattaaagtttcagattgaakcttttttttcccccttaacaagcttaaagatattaataattttaaatggtaaatataaaatacctgctctgtatagcttccccaattctaagaatgtaaaaaatattacatgcttgttataaaaattgaagcattacacacaaatataggaagtccattgtaaccccacaccctaaagatcacaaacaatactttcgcctatggctctaacacaatcattttcattttactgaataacttccatatgcaagtatagcatcacctagttgccatggtagtgcatctactatatggtttggttttgatattttcctctctctctcattcccataatataggaatgtaggaaattttaagaggacattgacttgttttatgatcatttgagctgtccatagttagcctatccagtggattaaagatgcataaccattgtgtctgggatttgttcagtgccatcttttcaatcattggttacaatgaagctgggagtcccctctgaggttcggckttctgtggctcctctcccctgcactccaactttctcaaagcctgagcctcaagtgatttcccagtagytaagtaaactgcccccttcctccatcttcaccaagttcccaaagctkttcagactcaggcttcaaatctaacaggatgtggctccacacattatatttcagttgttattttttaatgtggaaaataattcaggaaagttttggctaatgcttcaagacatcatgcactttatacacaggatttgttcttaagaaggtagtatagtgacaggaggaacaatttacttcagaatatccattttatgtccaagccatgcaccagccacttttgacagacaggatttgagtatgatgataaaatggggtaagcatatattttaagttctaacatctgtataaataagaaaaatgaaaaatcactggaacacatctacatgctagtgagaaaataattactaacagagtaaagtttgctctgtgaaactgttgctcaaataaagaattattcttgatattagcatagagctgagaatattgcttttttccaaattcctaggtgagtaggcaatatagctagccacgatttttcaggatcatttgtaaagcttcacttttaggaattttaaccccaagtgttctaagacatcaagtaactgaccttttcatcccgccgaacaaacctcaaagtggagttgccaactatcccacaggaaattgagtcaccacaccaagcaacacacctaaatgtcgacagctagcaggacaaaaacagtgagccagtttaattttggcttttaccaagaacacatactgcattcattaataaaatacttcccctcaacccctgccagagtagtatacactgtggctctccttaaaaatacatgaaaactctttaactgcaccaaatcttgctaagtcaaggaactaaacagagaaaaacacccamgcaaaaactattggctaaactccctaaaggctgggagagggctatggaacagcaactgagaaataaattgagccttgaaggcccctgctacaacagcatcagttttcttcaaggcacctttgaactatgtaacacccgcattctgctgaggctcttctgtgaacaaacagtcctcaattcttgcgggccagcacttggcttctgtcacagtgatatgcttagaggttcccctgacacatggcctgaaactgtgccaggggctccaggagaagatgctgaagaagcagcttccttttgaaaaaggaaaaaagtaatcacctcagagccacagcagttagctagaggttgaggtcattttttgtgaaatgttcagtccattactcttacccacaactcacagtgatgttgaccattgaggtaaaaggatccactgtacgggatgtgtaactatgtggacattagtttctttgccaacacttgaaggtctgctaaaggactgtatcggcttgtcataattcctagatagacctattggtatacatgaagagaacaagtccaaaaaataccacttattttggacactatttgtatgcccttaatttaaaaaaaaaatacaaattataacagctgaggtcgggcacagtggctcacgcctgtaatcccagcactttgggaggccaaggcgggcagatcatgaagtcaagagatcaagaccatcctggctaacacagtgaaaccttggctctactaaaaatacaaaatactagccgtgcatggtggcgggcgcctgtagtcccagctactcgggaggctgaggcaggagaatggcgtgaacccggcaggcagaggttgcagtaagctgagattgggccactgcactccaacctggacaacagcagaagactccgactcaaaaaaacaaaaaaaattataacaactgatccagattttttttattattacactttaagttctagggtacatgtgcacaatgtgcaggttagtttcatatgtatacatgtgccatgttggtgtgctgcacccattaactcctcatttacattaggtatatctcctaatgctatccctcccccttccccccaccccacagcaggccccggtgtgtgatgttccccttcctatgtccatgtgttcgcattgttcaattcccacctatgagtgagaacatgcggtatttggttttttgtccttgtgatagtttgctgagaatgatggtttccaatttcatccatgttcctacaaaggacatgaactcatcctttttcatggctgcatagtattccatggtgtatatgtgccacattttcttaatccagtctatcattgatggacatttgggttggttccaagtctttgctattgtgaatagtgccacaataaacatacgtgtgcatgtgtctttatagcagcatgatttataatcctttgggtatatacccagtaatgggatggctgggtcaaatggtatttctagttctagacccttgaggaatcgccacactgtcttccacaatggttgaactagtttacagtcccaccaacagtgtaaaagtgttcctatttcttcacatcctctccagcacctgttgtttcctgactttttaatgattgccattctaactggtgtgagatggtatctcattgtggttttgatttgcatttctctgatggccagtcatgatgagcactgatccagattttttaaaaataaaagaactacaacaaaaagctcctaagagcaaatacttaaatctccctaaccagttccagcttctcttctcttaattcttacaaaatttcccctttgttctamggaaggaattgatactgtctacagtagatagaactggaaaaaatgatttctgtttcaccgtgtattgctttgagctagtcattcctttagtttgctacagtaaaagatttgtgtaggttaggtctaacttttgctgacttaattttttttcctctatacattttatctgatgggaaatacatgaaggctttggattctctttcaatgtgtacatgtaataggtttaagcagagtttgctagtggcaagctgctctcatctccaagtgtatttctggcatcaaattattgttttgaagtattttaaaattgtataaaatatataaaactttatttagtacttcataaagcttccaaaggaaagatgtgtgcaattttgtgacggttttctttttcttttatcttctcactaactacaattgtttttccgaatgttgcctatgcctctagtagaatttttatatgaaataaacatgaggttggctttcattgacttttagtcccaccagtaactcaacatttatttagcactgactatgtgccatgcactttattagaggctgcagaaacaagatgatgaaaagagtgtgtcccttacccagagtccagcagaggaggtaatttcagcaaacaactgtagagtgcactctcacagaaggaagcatgtgggctatgggacagtaaaagaggactatttaaatcagacagggacagaggtggagtgggaaaaggctgagtcctcaagaatgaaataaaagagagtgggaaggatttttaagagaaaagatgagcaagcacacagacctatgatgaacaagatgtctgtgtcggccaggcgtggtggctcacgcctgtaatcccagcactttgggaggccgaggtgggtggatcacctgaggtcgggagttcaagaccagcctgatccacatggagaaaccctgtctctactaaaaatacaaaattagtcgggcttggtggcacatgcctatattcccagctacttgggaggctgaggcaggagaatcgcttgaacctgggagatagaggttgcagtgagcagaggttgcgccattgcactccagcctgggcaacaagagcataaaaactctgtctcaaaaaaaaaaaaaaaaaaaaaaaagatgtgtgtgtcaaaaaagaaataaccatgagtagggccttgcttaggggaacagattctggagaaatctgagaaatcctcagccactggccatctcaaagactggccatgtcaggcatctgcaggtaggactatatcttcaagagtaggagtcacagagtgactcagagtactgtgtgacatgggatctgattttattttatatggaaaattctagtgctatgcaattaatggaattkaagaaagtaaagttgaagtcagtgcaaccattatctttgaccatattaagaataaaattaaataacttatagaccatttgcttctctgacgattattcttatctaagacaatctctgtattaaaatcctacgcagacatatgttcccacaatatgtcaggtatgaacagaaggactgcccaatgtgacttgaaagggagtggacttcttgctcttaaaaactacaaccttgtagtcactaacttattaatcatactgtaataagatggagaaaaaaacaatggaattcaccagaatttctttcacgagagtctgcctgcattaaaatgttcgataaagctatttatgacagaaggtgagactttgaagagctttggtttgggtggaactaatctgtgcctcatctacacaggaaaggggaggaatatgccagttgctagagagggaatatgtatgtgtgtgcatgtgtgtaagcgcatgagagagcgagagaatgtgtgtttgtgcacatgcatgtgtgtgtgtgtaagagaaaggagtcagcttggtctctgtgtgtgcatgtatgtaagggcatgaaagagtgagagagagagagagaatgtgtgtgtgtgtgtgtgtgtgtatgtgtgtgtaagagaaaggagtcagcttggtctaaagggtaactccaatttgtacatttttcctttctcccaatcatcaataaggttattgaagatgtgtgtgtgtgtgtgtgtgtgtgtgcatataagagaaaggagtcagcttggtctaaagggtaactccaacccgtgcattttccctttctcccaatcgtcaataaggttactgaaggtacaaaatcccgacttgttttgttttgttttattcattgaagggactgagcttgaaggccagattggcccaagcagaaatgtctctctgagctgacataagagaagagtcaaagaaagaggagaaagcttttataagaataaggaggccttttgtccaaaaaattggagtttgagctaagtttaattaggcatctaggttgggggcttcatgtgacatgtgtgcaactgtgagtgatattattctttgaaagaaactggaagagtggagaaagattccaatctctattccacttcatacaagcaattccaggcaattcagctactaatctttctagggccttatttcacctatagattggagataataacaagagccttgtaagttattttagttcaagtgagaggttgtgagttaaataatcttgcattgattgcctaatagattcttttcccttcctcctccattgtatcttcactttctcctggactcaagtctctaacttaaatgcaaacattctattaattttagtgagcctatcaactaatacctaggtataacctcggggtccagaaacttaatagwtacctggaacagtttttagggtagttagaaagaaaaaagaatttcaaggaatgaacagggattcattctgaagaagttcacttagagaacacaggccattcaggaagctacaaacaggtagggatataaagtttagatcagacagtggacaaagataaagatggagaactagtcttggaggacttgtatactattctaagacaatattttcttctaaagaggccattaaaaatcttctaagtgaggaagtcacatggtcagatttgcttttcaaaaagattactctgggaatagtataaaggcagatcagaaaagtaaagaccagttaagaggttggtgaccagataaggagaaaatcctaagcagtccctgaaggggaaggagaagctgcagaaagttaggaggaaaaactctcaggagcaaagaaaaaggaaatgtcaaaggaaaatattgttatggactgaatgtttgtgtctctccaatattcatatgctgaaatctaatccccggtgtcacggtatttggagggaaagcccttcggaagtaattaggtcatgagaatggagccctcatgaattagattcgtgccattataagaagaggccagaggttgctctctttctaccatgtggatacatgctatgtgggcagtctgcaaccctgaagatgccctcaccagaacctgactatgctgacaccctgatctcagacttccagctcccagaactgtgagaaataaawgtttgttgtttaagccatcagtttatggtattttgttatagcagcttgagctaagacaaatatcaaggctttgccattgatattcagtacagaccgtatatacccacaggtttgcgctaagataattttcattccaaacacatatttcagcaacacaagactaaagagggtgttaaagaatgctactgaggaagcttttgtctgggaagttgtttgaacaaagttacaggacaatttttgcaaacaggtttaaaaaaagttacaattatgtatgctatttacgtattcttgttgtaattttaggaatcaattttatttccctggggggactgtaggagagcatctgtgtttccatcatatactatcaatcttaggatataacagtcttttgttcttcacctttgtcaattactgcatacagtattccttagagaaaacaaggagtttgaacagattatctttagcacctacccagctctaacattcatttattatctgatttctgaaattgtactatctgggttaggtgttggttttaaggttgttcattatagttagcctggatggggtcagctatgtttgtagagggaattcctaaactgaccagttacttgtcaaggatcccatccaataccatgatcctggaattctgtgagtttagctcaactgttcttcaggggtacatgttttctatttgaaattgaggtatyctcagaaataaagctattaataaatagaaagttctggagtatatttacactcactctgcttatctccactcctacccctaccatattcccatccaatactttgccagttgacttaccaatttcttcttaatttctgtaactgtcaccttcagtcaaattctcatctgtgtatttctagattcatataatggtctactactggatctccttggattcactttttctcaacacagtcctatttataaagtcagaataatcttccttaaaccctggttttattgtttcattcttttaagaacctgctgcacaactctctcctacttattgtattaatgtcacacttctgttcacataggcctttttcggctgcttttcaatacctttcccttttatttacatctaagactatcccatccaagactgcccatcttagccaatctttccacctggaaataatttgctggcttctgcctgtatgacttttctaatgtcatttttatatttgtgtctaggcctttctataactgtctagaaaattcctgacatttacaggcactcagcaaatatttgtgagtgaataatcagtaagtatgcttgttttctatcagataagaatatttatttccaaaygagattcaaacagtaatactggcctgggtgtggcttcctacatgtaatcaccctcgtctatctcttgttctcagtcttttgctttcaaactctttctctttttttaaaagagtattaggaactaacattgccaaaatttggtaatggtcaagcagatcatggtgtcttactgaagtgaaatattaacattaaaataaaaatgacaagtattatggtatatcattcatatgtaatgatccttacaaaatagagtaaaattttaaaagaattcaccaatacaccagtatgatgtttgggagaaacagatgaatgcacaaaggtgcatctgatgcaaacacccccagaaaaatgagcataagttcatattatcaatatttttcactctaaaagtgttcactgacttccctgaagtcaccaaggactccaagttaagaatactttcctgagtgaagaaaagaaagcaattattttaatcaacactgccccagaatcttttattcggaatcgctatctctgctttcttcttcttcttttttttaactttctcataaatctctgtttagcatttatatctctctcactatgagatacctaagggttaagaagtaatgccaaagagacatttgtccagttgaagactgggattaagaaaaaacacacagccgggcatggtggctcatgtctgtaatcccagccttttgggaacccaaggcaggtggatcacctgaggtcaagagtttgagaccagcctggccaacatgatgaaccccatctctactaaagaaaatacaaaacattagccacgcatggtggcgggtgcctgtaatcccagctacttgggaggctgaggcaggagaatcacttgaacccgggaggcggaggttacagtgagccgagattgtgccactgcactccagcctgggcaataagagcgaaactctgtcccaaaaaaagagaaaaagaaaagaaaaaacacacaaaagatttcccgaaaagactaggcccttttaaacaggctatgaacagagtctcagaaaggtaatttcttatgtacaatttttaatctcattacttgcattacaagcaacacatatgagtgataaactattttggcctactggtaaacctacatttgttaactgtgtgtgcattatagagaacaaatttcagaactcaagagtatatcggttatatttggcttatccagttgtatatgaactggctccatacacgaataagataaattagttttataattttacaagaatatctatggagatttagatttggctaagaaagttattatacacacagaagaatccacaacctataagagctcttcatgggaaatagtgtgatagatcagaaagagcatggacttttgagtcactcagaacttgaattccagccttgccattgttctagttgtattatctgaaataagccatttaaaagacctgagcacattgtatacattgagaattacagggttattatgagaaatgcataagaaatgtaaagtaccaagggctgtatctgacatatagaaggtattcaatcaatagtaggtatactgaaccactttgcagagttgtttaaataagttaattttaaataaggtagttaatatttgagagtttccttccttttccacagattctcaatcctaaaacagttactatttttccatcatcaccatcaaccctcaaatattaaccagttctgagccaaatgtgagtgaacaacctatgatttagaatagcttttagaccaggcacagtggcttacgcctgtaatcccagcactctgggaggctgatgcgagcagatcacttgaggccaggagttcaagaccagcctagacaacatggcaaaaccgcatctctactaaaaatacaaaaagtagccaggtgtgtgtggcacatgtctgtagttccagcttcttgggaggctgaggcaggagaatcaattgaaccctggaggtggaggagatggtgccactgcactccagcctgggcaacagagtgagactctgtctcaaaaacaaacaaacaacaaaatagaatagcttttacaagaccacaccaaatcatgaaaagtcaactatgtaggaagaatatgtatttgtcattggttaatgacagagcatcacttacactgaggttactgggaagatcatttcaaacatttcccaaagaatgttccaatcaatattgtccttataagattctccttactaatgacgttttgtggtcaaacaagcttgggaaatattgtatatgtaggctttttacagtgatttctaatggacacgaacctaccaaaagctagaaggtccacagcaaaatgagatatttaattttattaacaagcattatctaaacctgtttgattttagaatgcatttttcacacaacaactatcacctcttgaagaatacctggaataggttttcctatacctatacctatatgtcaggtaactccaaaacattaacaaatacatgtgtttagtaggttcccatatggttgaaatctccactaacgacattttatttctcttcctcctgactttgtatgctatcgagaaatggtcagagagtaatcttcctccctccctttcttcttttctttctctctttttccccctgaaagagaatagtcaaaaaatccatacatatttattgagcctctctgatgtgatagttgctgtgaaatacaagaacatgaaagattcagcagcctgggcccaggaaggaaccataataacctgctgagaaaatcagacacatgatcggctgctgcctagagacagtgtaaggtagcatataaatcattcagcctgggagtgctactgtagttcgagcagggagagggaggtatggactatagctcagtgtgctgggtttcaggaagaaggtgaacttggatgtaggtcttcaaggaagactgtggttttaatggctgtgggaggagggagtccgctggcattgttttcaggygtaggaaatgtctgcagcctgaataaaggttgtatgtgtggacagtaaatgggctgggtggagtagacacattccagggaggagaagggatatagagttgaacacttaaatgtgtggccttgagctagtggatattgtgggaattggataagtgcactggtagcctaagaggatagaatggagaagagagaaggatggagactaaggagctattgtggtagtccagatgcagtggaaagcaaagagttgtggaggtatccactttagtggtctacgatgacagttacaagcaatagaaagagtatgacttgggaacagtggttcaaatgctggctctgcaacttagcaaccatggggcaaatttgggcaaattaacttctctgtacctcagttttcttttttgtaaaatagggctaaaaatacattccctagaaggtggcctccaggccattttcccacactttatttgaatgttaaaactaactttaatctaaaaatcatatattcatatctctatcttttttggcggttcagttcaacttaaatgtgttatttgttaaaaacttgtaattatcatctattacatgtaaaatataagagctgcttttaatagtaattcatctcctccctatctttttttaaaacatggtcaaaattaacaaaacaatcttgtatttttgatactagtagtggtatcactactactagaggtacaaggactcttgtacctctctgaaaagtagcataattagcaacagtattgatggtatctgctattttagattatttaaactgtagtcactaaggtaagcaaggggaagaaggcatgtcatttatgtgtttttcatccttaagattagcgtttggaagcatatattattccacagcaatctggataggtcttgccatgccctgatcttgtaagcccaaattttattttgaatactccagctttgcacttaaatgacagctccttgataaaagaaaaacaattgcctaacaattttcttccaattgtctgaaaacataatgggtgtacatacacacacacacacacacacacacacacacacacacacacacacaatctctagggcatatttactagatagtattatgtaatgtgtagacatttttaattatgataattaagacaaaaatatgtgtagcaagtttttgatttgagacaaatttgagatttactaaaattattatatgtgtgtccttctgaagacttcatattttcattatatatcttcattcttgaagtataactcttaaattgttgaattaagttttatgaattaagttgttttgttttttgtttttttttgttgttgttttttttttttggccaggcacggtcgctcatgcctgtaatcccagcactttgggaagtcgaggtgggcagatgacttgaggccaggaatttgagaccagcctggccatcaaagcaaaaccccatctctactaaatctaatcttgtgcctcaagcgaggcacaagactcacttgaacctgggaggcagaggttgcagtgagctcagatcgtgccactgcactccagcctcagggacagagtgagattctgtctcaaaagaaaaaaatttttttccatttttaccaataccactattctcaattcatccactatttcactaggaattactaattcagtttacataatttattcaatgaataaattattcaatgaagaagcttctgggtatttaggtgctacatgctaatttcaattggcatattttgtttttcaaatttgttcttggtgacccaataattatacctgtccaccttgaaagtgtctttcttcatcaccttcaaggccaccgctaacaagacctttgaaaagaagtaaacagtagagaatttcaacttctgtgatgaccaccgtcttcttctgaatccccagactccactcatacaaggttttggggaagtttaaatgaaatgaagcagtggcttacaaagtttattgacagtaaactacagtaaaatttatattttatactataacctggtagatttgtttaaagtaagaggtgctcacttttgaaggcatgtggatgctggctttcagtaatataaaaaaaatgtacaaaaaggttttatacctatatttatttttaaaaggtagaggagagcagtggactcctatttaaagaaactcttgtgttttataaataatagtcatggcaaaatttgtttacagtctttaacaaaccatgcatttcagtataaattaaaccaataaaaagaattatatatataaaataaaaaggaaatgtatatataggaacagtatataccatacacataagagtaaatatatattcgagccaatacagagaattgaaacataatttaacatgaaataacatttatccttactatgtatgattcactctgatgttttctatttwatttaattttaaagtattaattgtgaccccttaaattgattttgaaatctaccaattggtttgaaaacactgaggtaagaaattaccttgcttaataaatgttagttttgtttccctcttccctcttcctccctttttataattaaaaaactctccctctacttctctacttcacgtgagagtagaacacataaaaagatttcagttaactactgtgcatattttttgaagtaatttctccataatgtgtgagttttctcagggtactacaagtttaccaacagaacacataaagcagcggccactcactgaaatgcctataggagacagatagaccatatgaatgaatgaatgacatggttgctgggcatcctggttgcagtggctagaactgtggagggtaggagcagaccaccatatatcctaggcatttcattggcaaatgaacaggagaaggacacctttccgtttggccctcattttcctagatctttcctcccttcctctgtcaatccctcctacatagcctatgttcccaaagcaccccttgtattataataataattattatgatatctgtccttaatcaagaacttatactggatttttaatgcctttaggtcttccccaaacttcagttcatctattcgaagtccctataaaatctacctccttagacttgtctgcccccattattcccctgtggttgacctcacctccatctctatcttttgtcagcaagtttcctcagagttccctctctgcatacttgttcatgctgggttatttgtttttgccacttgatcatctagacctttttccctctttccctccttctattcaatttctgcctttcactgctgtacaaaggaggggcagggaggccctccagggtggagggaatcagtcttgagataactgagagattcagggtgatgagtcccaaagttgaagagaatccacatacttcttctgtttttgttttacctagcaaggagccttttctatagacaaagttrggaaaccagaggttatgacgtgattcatctttgcctacttaaactttagcttgattcatcacttctcaacaaatacttgttgaaccccaccagtaatacgagaagcttggtattctatgaggtgctcaacttccaaagcttagttcagaagaattctggcctcaaggcgtctaccatctagaagcaaacaactaacaaatgaacaaatgcagtgatttcaaaagaaattaaggtgtgctgtggtagaggcatgcacaggtcagaaaagttcagaggttccagacaggcttcctggggaggatatccatgccccscctccacctggtagttcatgatcagagtttgcaagcttggctgggatagagggaatagcgtgtgaaccacagaaggagtggatctggtggctcagacacggcaagaaccagctcatggcactaggctgcaggcacaccatgcacaaaacagtcttttctttccccagttctccaaattctctaaagtggaagcctaggggtgagggtaagaaggaggtaggaagctacaaccactggagcaaaggacgaaagaaggggcttgagtgtctaaaagtgcagaaactcaaccgactggacgctgagacaatgtttaaaaaggagtttttttgtttgtttgttttcttgtgtttttttttactttaagttctgggatacatgtgcagaacgtgcaggtttattacataggtatacatgtgctatggtggtttactgcacccatcagcccaaactaggttttaagacccgcatgcattcggtatttgtactaatgttcttcctccccttgctcccccaacccccaccaggccccagtgtgtgatgttcccctccctgtgtccatgtgttctcattgttcaactcccacttatgagtgagaacatgcagtgtttcgttttctgttcctgtgttagtttgctgagaatgatggcttccagcttcattcacgtccctgcaaaggacataaactcattcttttttatggctgcatagtactccatggtgtatatgtgccacattaaaaatgactttttaaagtggcaactgtgggaggcaaaggagaaaaaacaggagctgccagataagggagtgaagagaacccagcactttgagaattccgttacattttgcagcttgaattcttcactttttgctcccattatgtgcctctttctcctctccatgaactgggccctgtggacccaggatcctgctgtctttgcagggcaaagaatggttagaaatgaattcattaaggtgagaaaccattgctggcataattctccttcacggaaacctggcacttaaatttaacctgtttggttagatccagctctgcctcccccatttytttctgcagaaacaaggctggcagatccctgttcctcttaatccttgaatggaccaaatgctgggttatgctggggcagtgagggaccttacaaacactgaaatttaagagaacagtttttggagtaaggcagtccttgtttccaaatctgagctttgccactgaytgactagcttggcaccttataaaagtgaattaacctagcttgttttctaatttataaaatggagaaagcagtacctatatcacagtatgattctgaaaattatttaaataggactatgtatgtaaagcagtgcctgaaaaatagcaagtggtcctaaagtcactatgatgatgaattttatatgcaggcacctagagcatgttaggatttttgggatctttcccagctcacactgaagcttcactcttctccaacagtctgttatccaatgctggataactgagatagtcttcccagcatttatcaatgtggttaggaacagtaatcctggaaagcattctcaaattatttatctaattaaacaagcaaacctttttagcccagacatcctaaatctctgtagcttgtcttcgctgatttggtcagaatagctcagatggtaggaagggctttctgggtagaaaaaaataaattagcagtctggaaaacaaaagatctctgcttaaaagagtctctaaaacagcctgatcagcctgtgtattttgccatattatctagcattagtaggggactgggaaaaatccagggctccttgtagagatagagactggcaaatattatgtttgatgcatgagaaccaaatcagaagttaactctttaagttattaaatcactaaacagtctatcacaattatgtgtttattactagactgaatttctctggggctggaaccataatgaattcattttttgatctctggtgctaaacactggctgtcatatactaggtatccaataaatgtttgttgaatggaactgaaaaagcatgaaacacttcccctgttaaggcttcttttctataatatttccatagtttctaatgcatctgagaatcattaactggactgttagaggaatatgaatatggttgagggagctacaaacttcatgctctgagatgtcacatgattagtgtaacttttgttccaggggagagaaatccctaagagagtgactgttctccatgcccacccacccacagtgtcctatagagcctttcattctccagatgcctataatgactatcacattgatttgtttacatatctattgccttgtcttccttataggtacagagtccatacatcctaattggcctggaacttccaaggtctatgcctgttataccagtgtaattatgaatagcattgcctttcattctaaaaagtgttctggtttgaatgctaaatcatctagacaccctacttatgagagggttcactgtacatcgtttagtcccccaactcccctccccttggaaatctgggtactaccctctaccgggggctttccactatggaggcagctctctcaatcacagcattcaggaggtgtaagtccactcccaacagaacagacacctgtctacaaagagactcttggtggaagaaaaaaaaaaatcacttccgtaagtttaagtcttccttttaaacttgggtctcttttgcacatcagaaacaaagaatctctaataattacatccctaaatgtactgaagtctagaagacatgcccatttgaaaactctaatctagtaattaaagcttctcaggttaaactgcaccttaataatgtagcttattttgtcaagatcagttaaggccctgtaatgtgatttggaataaatggacagacagaaattaaaatgtgctggacaaggtaatcagaaatctcacttcatttagtcaataacaatggcaattcagcgggttccttttactactgggatgtaattgtgcttggctttaatttcttgtaatgatggaacaaattaaattacttcatacttttaggaacatttggctacatcatgttttggygcttccataaaccccactggaaattaaatcagctctgtggttgctcattctccctctttagtgccatgtctgccttctgtcagcaaaatggtaatattgtctaccttaatccaccagatgcagttgagttaaaagaaattacctctcccacctctttcctttcaaatctccctatttgtagctatcaaattttggcatgcctgctggaacacagtcttgttagaacaagcacggtaattctctcgtgagactttaggactctctctacgacaaggtcagaatgtacctgtgattcaaatttagatgaggatatgagttggtaagaacatgaagagcatcagacagttttcaggacacccactacttttattttgtgctatcagtttttcctttcccaaattgcaggtggagatgcaatctttaacgctggaaatctcttgctatatgccattaaaattaattagtctagcacattttatctttaggcccttacctagggcaggtaaaatattctagcacaaaataacacaactttcctgaacaccatggctactaagttcatatggtaaagattatactatacattaccttgcaaatagagtgttgcagactgatattaaatatttaaaatgtatgcaggattattaataggcaacattgtggcagagactgctaaatgtcccctaatattgatgcttttcttcatcacttgttttcaaatacctgttttcatgtaagcatgtgactgcccaaaatagagaaaattcacagcctccttggttgccaggtgttgccatataactaagttttggtgaatgagttggtagtagaagcgttatgtagatattatatgatgtgctagaaacttcccttaagagaaatttgtcatctatctttttatctgcctgtatttattgttttctctttcctactggctagaatgtgaagttgatggctggagtcggagcagccatattggatggtgagttgaatttagcaacagaggctacacctcacagtgcaataagatggaaagagcacgtgtccttgaagactgtactggatagaggtgccatattaacctcggactgccaactttcagattttacatgaaggagaaatatctgtcttccttaagccacttctattttaaatctctctatttactgctgaataaaatctcaactaacgcaaacaccaataacaaaaaattcctattcactcatgatataggattataccttagtcttttttgtgtcatatatctgttcattcaccatttttgctttgatgttcaataaacatctcaaatttaacatatctataaaaattttttaaattttacgttcaggggtatatgtgcaggttagtcatataggtaaattgcatgtcatggggtgctggtgtacagattatttcacaccgaggtaataagcatagtacccctacagcttagtcttaagaagaagtatgttcacataggccaggctgagacttggatgttggatgactttcttccagcttactctgatttgaatatattgtgtggtagtagatggctaaactgcttgctccaaaactatctgacaatgctttttagaaagtctgccaaacaaaactacaagaatcaccctggagcttcccttaggcttcagatatttgtcttccctgccctacttggaaatcattccagcctggaagtcattgtgaggaaccaaaaaatggtctccctaccatgaagaataacactgcttccattgttgggaggctctccttcctacaggcactgtccctcactcattagacacttgaataataaggatgttcatatatttattggtgttggtatcagttagacagttgaatgatacaaatgttcatatatttcttcttattcaatagtctcacaagaacactattcttgtaaagtcattaaaaactggatggtcttttcataattatttccatgatttgtcatctaaagccagtgttctctcctcctgtcaatctgatagctttaaagctaagttctgggtgggtccaagtcatgcctgaaaggtttatcaaatgacatattgcagtcatatggtcggagcacaaacacctctgaatgtacaatattttaaagcaaaacagtttatgtgtaagctctatgaggttacggaccatgactatcttatttattaccaaatccccagctcctagaacagtgcccctcaatataaatctgtcaaatgaataaacgaagagtttgcctgcagtagtaaacttgttatttgcacacactcgaggcccacctctatgtgtacattgtcagtgagtcagcctcgtggatgactctgcaggactgtctgtataacatscactacagttaccaggggacccaattttcataaattgctccagcatcacaccctcctcttacagagactcttcctgtccattctaatccctgacacgttgtcatcctcactcagattccccaatagatagaaatgctgttaaatatacttgggtagagagggataggcatgctcaaactcsttttgggaaaaaaaattgcaactgtcagaaatgtgttagctatcttcacagattatgaaacataaatatcaattatctgttcacagcagtgaaagcctgcatatttttttaagatagcaagtataaaacggctataagtaccatgttgagtagagacctaccaccgaagtagagaccttcactgaaatagtgaagggatggttgtgttgcagggtcagaatgattacccactggttgacactccctccaggactaaaggcagcatcaccagcgtccactctgcttctccactgcttactgttaaggagcaaggcaatagcattatctaagtaggaactacttcattctttcaaaacctggaatcggctgatcagaagaagaaaaacagtataaaaatacagaaagacaagattctctggctgtcctaatgaatgctagctagctataatagcatggataagacatataaccaaacatataagatctattaattaaggggaatctctatttgtattaactcatctattttctctaaaaccagtatttagttatctcccatacattggcatattgtgtatatttgcagaattcaaaatgttactgatgtgacttttttccatcagacatctgagctatccctcaactaatagttgagctgttcctctatagctcagtatctgagttagaactcgaagtaaaaaggtataaataagtcatgctataaaattcaaaggcaatcagatgtttgagactatagttatacagaaaagtgtccttgttcttgggaggaatacatcgaggagtttagggatagagggctatgatgtgtgcagttttctctcaggtggttcagagaaaaaaagacaatgtgtgtgtatgtatatttgtgtgtatgtgcacatagagtgatactgcaaatgaggtggaatgtttacaatgagtgaatgcatgtggttttttttttttttttgcactacccatgaagctttccagtgtgtctgaaataacttccagataaaactttttttaaaggcaatcagaacagtggcaatgaataattcaattatttcatatttgagctgtctttcctgccacccccaccccctataacactacatacatacataggctcacataagtgacacttactatacttttttgcctatgtaatgagtgttggcgaagtacgtgagtgggaaattcagtcttttgcattcaagctctaagtaattctaagagaccttttagataatgatttgacttttaagacaacaattttgaggttataatatgatgtcatttcatataaacagaactgcccttttgtcctttcagatttgattgaaaatggcccatggagtacaaccacctgggaacatatcctcgagaaagacagttgaggcttattgcctaaaccacaggctactgaaaacttggccaaaggcgactactctagactggtgacttcaaaagtgctgatgaatacagtgaaccatgaaagatgcattatttgttttgaacattttactatgattgatgacccagatttggcaagttagttcactcccagtggagatgaaagtttcactgccttctttctttcaacattcttgttgagacagatttcacttttattggccaatgtactaacaaatcacttgcatttgcagcataatgaattcattagcaacactgtggatcaatgctatacataatattcctgagtcaacattaactcttaattaaacttccttattataatgcctctggaaattttccttcaggctactaaacttcaagccaacagtctaagtgttaatcagtaatcatgctagtaactttttgagatgggtcagggccagggccagggtcagtgatccatcatgaatggcaggtttaaaaatggatatacgtgatcaaaaatacccataagttgaccaaagcattctaacctttgggttattctaacactcagtgtatcagccttctgagcaagccaattttttattgccttaaaaagtctaaaagaaagataaaaacagagataatcagttttgtttggcaatggcaggggtgtgggaaatgaaaaagaagaaagttaaagatgagtgaaaataggatagtcttggcactttggtatgaaattgaagtacttatttaaactgatgaatattgtacagaaatatacagagagcagtgaggggctaagaacctaattccaaggtaactacaaggaaaaaattattgatctggattgtgaccagaattcaagagtttgactgttgtcattgttgctgttgttattaagttaaaaaaaatgagaaaaaaatatacttttttctagtatacttaccaggaaaggaaagagagaaggagggagggaaggagggagacatggagggggcagagggagagagagacaaagacactgacaaagtctggaaaaagacacaaattcagatttaagatcccaaaatatgctacatttctgcccccttcaaaatattaaactttgctaaaatacactggaaattttttttattgtttattttttaaatcaactagcagaccaattagccaagatgatattttcatccttggtactctttcaggtgagctctgtgggctaccaccagaaagtcctagccaaccaagctctcactgggtcactctgtgctagctagactacatagcctcctaaaaaagcacrcagccctgatgctggtcctgccaaagtgtggtttgctgtcatgtcctacaggctacccgtttcccagtgatttatcataataaaccaaatgggaatgaaatacccagaaatatgccataaatctactagtggtgaattttcaatattctgcacaccatggtgatttgttaattcagttggatctctattaawcctctctaaaatgtcattaarccatctgttttgacttgttaatcaaacaacttttaaaaatgtatttagagtatcagtaacccttgaattaatgcatccatcagtaataatcccctctccaactttagatttatttttaagctctagcttttttccccaccattccaacaaatagcctgacttccaaaagtaagaatcaatcacttcagttgtagaaatgtccagagggtgccctactttcgaaacaggaagtaacttgatccagcagtcccacttcttggtatatatccaaaagaactgaaatctggatcttaaagagatattttcactgcagcatatttgtaatagctaagatacagaggcaacctaaatgtccatcaacagatgaatggacaaaggaaatgtgatatatayatacacacacacacacacacacacacacacacacacacacacacacacacacacacacatatacaatgaaatattattcagccctaaaaaaggaaggaaatcctgtcatttacaacaagttggatggaactggaggacatcatgctaagtggaataaaccagacacagaaggacaaatactgcatgatctcacttacatgtataatccaaaatagtcaaactgatggaagcagaaagtagaatggtagttgccagaggctgggggaagatgggaattggtagatgtggtcaagggttacaaagttttagtcttgcaaaataagttctggaaagctgctgtataacataagtatacaatcaacaatactatattgtatacttagaaatttggtaaaagggtagctgttatattaagtgtccttaccatgaaaggaaaacaaaacaaaaaaacccaaaaagatgggaggaaacttttggaggcaatgaataagtttatggcattgattgtaatggtggttttagggtgtatacctgtctccaaacatcttgcagaataaacatattaaatctaaagtttccttgggaaagaagatgagaaaataattgtcaagagactgtacaccaataaaatagtcaaggagtacaatgaaaacttaggaatcccatttcttcctttgactcacactgtttgatgatatcattcacatcggcatttggaagttattgagacatttcaacataagattgtccttatgatctatgatttgggactctcttataagaaagtccattctataccaatttgttttgttccttggtaactagaccttctttaattggatctaagaattaatattcctatctcataaagaagactaaaaggatccaagtagatggagtttcaaaggtggtccccataaaagcatttttaccttaagcaaagatgtcccaatttttcctgcttgcttttcggatgctgttctaaaaaaaatgtaccttattccttctactaaaagaaaacctatcaattcattgattcattgaacaaatatttattgaacatgtagtatgtactaaacactgggtaagattccagatatgcaaagaggaataagtccctgcccttaagaaaactcacagtgtggtcaagctaacaattctagagcaactgtgtgataagggctccaaaagcacatgcaggaacacagagagaggcactcttagtcttggaggggcttcctacagtgggcaatttttgatgtgtcacaaaaggaggagctattagggcacaagaagagcaagggtgaagtgcagaaaggagtgaatagatggggaggggacccaggcaaagagaataacatcagcaaaggtgcaacttcatgggaacacagtacatttggaagcctgcccaccatttgttacagcagaatgcatgtgtgggtggagatgaggctgcagagatgggctggagaggattatgagagatggatgactagcaaaggaagttggtcatgtccttatgtggtgggggaccatggaaagatttttatttataagacgtggtttattcttcattctgtggcaaaaagcagatactatagtctgaatgtttgtgtccctccccacattcatatgcgatgaaacctcatcaccaatgtgatggtattaggaggtggggcctttgggagataattaggtcatgagagcacagcccttataaggggattagtggcttataaaggaggcccaagagagctgccttgccccttccaccatgtgaggacaaagccagaggcactatctaygacccaggaaatgagccctcacaaaataccaagtctaccgtgccttgaccttggacattctagtctccagaactgtgagaaataaatttatgttgtttataagccacccagctcgtgatttatttatttatttatttatttatttatttatttatttatttagagagagagttttgctctgtcactcgggctggatttcagtgccatgatctcagatcactgcaccctctccttcccaggtgcaagtgattctagtgccttagcctcctgagttgctgggattacaggtgcttgtgaccacatttggctgatttttttgtatttttagtagagattaggtttcatcatgttgcccaggctggtctgaaactcctgacttcaagtgatctgcccacctcggcctcccaaagtgctgggattacaggcatgagccactgtgcctggctatgatattttgttacagcagcttgaatggactaagacagaaggaaaaataggcctttctgtagcgtgagctgaaagacagaaaatagccataggtttctaaagagagaaaaagatatatgtttgacaatatgtttcaattagtactttttttgaaatgcagtaagttacctataccttattccatttctaatctatatgatggcatttaaatattgactaggtttctgatacagtttttggagtctgaatgtcactgcatggatgaataaaccaaacagatcggattcatatgggtttgccaaatgacaaatttttttccatgtaagattagaggaaaaactgatttcacccaatttcctgccttatttatattagaactgaagtcaatgctgttatccctttgcatgttcttttgtatttaaaatctgatatagaattgtgctgttacagaagaaataatttaatgcattctgccctcttatttctcatgagttttcatttaaaagaaaacaaaaaagaaaaaggacatggacttttctttatttctagactttataaactttttagttatcaaataaacacatgtattaattaagtaggtaaaatattgcatatattaaaaggtacttggagwctcatatgttgtcagtttttcatgactcaaaatttatgaaaaaccatctaagactatcgtaatgaagttcaattgtagatcttgaagtgacaaaacatgaaccacattgacttgaggtccagggcttaaaactgcctatttgagctctaggttaaaagcatgtgtgaaatgcaaagtctgacatctgcacagctgactattgtgaagtctcagtatcattgttcataagtaaagcttgtccctaagccataccacaagcattcccagaggatatagatttcatytgatttaacatgattgttgatattggtagtgtatttcacgtgaacttgtgaaatcattgtctatacagacaattgagacactaaaacttttttttaagtattttttgttaggggctagatctgaggttttttattcatttgttcttttgttcactcatttgttagttcagttatttactcaaaaatgtatattgagcaattcctatatggcagacactgacagatgctggattcagtgatgagcaaagcattcgtggtttctatgcccaaggatcctatcccgtggagtgtagagtcaagcaaagaatgtcaacaacaaatgaaaattttaatcttattaatgttatatgcaaaaatgtaacacctccaaaaaagacaatttatttcctattaaggaatgaaggcagtccactgaggaagatcaacatgtaagcacatgtaaagcaaaataatcaataggtaatgtagtttttgaaaaagaaggggctttaagcaggaagtcctgggtttggacttgggtttcaaatctagctatgtactcttgggccacatacccaagtcttgtaagtctcagtttcctcctttttaaagttagcctaaaactacctcgctcatctaatggtgtgagaattaggtaaacagccaggtagctcatcaaattgtaattattataattgttattttttgagtcatgaaagttttcacactgaagggaacatttcaacttgacctggaagagtaagtagtttatcaggcagaaagaatttgttagggtattccagagagaaggaacaaaatgtgcaaattcaagtagtcagaatcaaaatggtttcttaaaggaatgacaaacagatcagtgcagttggagcctaaagttatctaaataatccgttagaccttttctttaactgataaaataaagcaagcattccaaaaatcaatttaaatccatcttcctccttatacctctccattccccataccatggaaacacagttttacctcttttacaatgagttgtcagcatgaagagacttggttcattaagattagcaaacttcacagcattgaacaaaagataaagaaaagtttatagcaaatacgttccatgtgaaagcatctccagcaggttcagaagatgcaatgaaaagactaaaacttgatatagggatatttcagtggtgctygtaccagcgtcctaacattttgttctaccttagtaaaatctatcccttattactcatcctatctgtagactctcttatggaacaagaagcttttttttttttttccctaatcccgtggggaagccctctccttccctgggtgattcctgagcaaccaggaaaacagcagtcacagtcaacacagctagtacttgcagaaaatctctcttctgtgatgctctgaatgactcacagttccagatggccttgtcagcctttatccgcattccactcttggcaccattaacctggtctastgtggttgcaacaaataacttttcttgttatgaggaccagtgttttgaaaaatttaaaatgttataaaattaaaatgtttatatttggaaattatttccaaatataaaaggagcctgtcttcattatagattatttggaaaaaatgcagaggggtgcaaaagaaaaatggaaacaagccatcttttttttacccataattctaccactcagagacaactactgtgaacattttgatgtatttatctccagtctttctagaaggtagatcactgtaagagatttctgaagcagaagtactaagtcagaaggaataaacatttttatacctcttaatgtgtattgccagatagtttttgagaaatattacagcaatttctacttttagaagtactgcttgagagtgatgttacatggtattctcactaacacatatacaatgttataaatatgtccaaaaataaaacttagcaactatgttatctccttgtttcaatttgaacttattacaagagtgatcaatttttaaatttaaatgttatttttagcaaagttatagatgcaaatagtttagagaactaagtagtaccacaaggattaaaaaaagagatctcctgcagtgcatcccccacccacaatacatacatgtatcttccactccccagagggtacccattttcaaatattttagctgattcatttgctatactccactctatctctaaatgatataactttacagttacttcttaatagttcatttttttgggcattgcttattgatacttcatagcggaagataaggatttacctttgcaacacttcacacttctcatcacccatccttctaatatattatagtcttacttagattgatagtcattgtgtttccatgagcagaaccaaagaaaaactataagcagctaaactatgtaacataccctgattacctttttttctttgttttccttcttgaaaattcttgtcttttgttagtttctttgttcccttagatgtccatatatacttatcactaattcaatcccaaacttttcccatattacaaaaatctaagtatggctcaaacacatcaagaattttattaaattcatcttcttgaagaaatctcatccagaggcctctttgacctggattggttattctccatgtctcttgctcagctgtcactttgggatgttctttccttattatcccaagggtaatgtttttagagtttattcccttgttttggtgagcacgttttccagtagcttcctgagtcagtatgcatcagagatacattttttaaaggctcgcacctcagaaataatctttattccatgctcactcttgatcaatagtttggytgagtatagaattcttggttgagaatcactttccttcggaatttaaaaggcatcacttcattcttttctaggtttcaaaacgaatcttcagaagtctgatgcccttttgatttttgatccttctatacgatacgataatgatccttagaacaagtcacaagtctcttttttaatactttatattgtgctaaatgctccaattaatgagttctggaaatttttcttcaattttgtcctcctgcagttttctcttttttctagaatttctgattttagatgttagatttcctgaactggtcctctgatttcccactttttcttctgtattttctacctttttgtatttttgctccatttccatagagatgtcctcaatttacctttcaacccttctattgagtttttaacttattctatcatgtttttactttccaagagctcttttcctattctctgagttgttttttttttttccatagcatctgcttttgtttcgtggaagcaatgttaatatttatgaatacaatatcaagtgtatttcttctcctctctctgatgataccttcttcctgcaacatctgtacttttttatttctcttctttttttttttttttttttttgagatggagtctcactctgtcacccaggctggagtgcagtgggaccatgttggctcactgcaacctccatctcctgggttcaagcaattctcctgcctcagcctcctgagtagctgggattacagttgcctactaccacgcccagctaatttttttatatttttagtagagacggggtttcaccatattggccaggctggtctcgaactcctgacctaaggtaatccccccgccttggcctcccgaagtgttgggattacaggcgtgagccaccgcgcccggccaacatctgtactttgaagttggtctttttccatttgttttggtttctttcacttactttttctaagtatttgataaatcttatctgtctactcatatttaaggctagagtactaaaaatcagattggaagctctgtttgcayaggtaagatttgtcaactacatccactttttgatgatccaactgaacagtttcattcagaaataccttgcaccattatctttgggttttttctcttgggttggtgaattctccaaaggttatatcaatctcctgtccagaaggcttaagcatagttggaagctgactaggggaagaaggttgggactttcaaccttcggaattcattcaacaaatatttgagcatctatatttggcagcctctattctagccaccggagacacagtggtaaacagaatttaaaaagccttgtgttatcatgaacacaaatatataagtgtttatttaatccctctgttttcagaatggcactcagtcttcaacctgcctaggccccccttgtctagggacggttttacattcatcaggaagtataccccttgtatacttgtttttcagcttccaaaattttgttgctgttatctcccttcccactttctttgtccttgtcatttatgcctataaacatccattgatggttttctgaaggcagaggagttaaatggatatgttaattactatagatgtaatcagaggtcttcatgttgtttttttgttttctgttttactattctaacttggcatttatagatcttctttgtgagtagtctgaatttgtctttaatgatttaacattgaaacagtattttccttacttatttgcataagctctttctttgttagtgtattagccattgrcctgcaatatcttttaggatgaccgattctgaagcctgctgactgagttgcttgtggttcctgtcatttagaatgtatgcaggtcatgaatcgcttagatggaacagatggaatgaaacttgctctaaatattttaccaaaataaatacatttaaataatgtaaagaaaaatcttcaatcactaggctttgaacttataacagaaaggtatctgcttttaactatattaattcaacaaactttattgaacagttggtaagtatgaagcatcatctctctgagaacaaaataccaaggaactgagtcccatccttacaggattctcaggagtaaatgggtcaatacatagttataaaatgatgagggctgatctatagcagaagtacaaagctgagaacaactcacttgacctgctaagctggggaattcaggaagggttcagatctaaagagcagacatttgaggtggttcttgaaatatgagcacaatgatggttttaccaggctgcaaaggtgacaaagtgcattccaggctgataaaagagggcatgcaaaatatggcaggtacaaaaatgtgtatttaaggaagaatgagaagtttctggaagttgctgaagatacagaaaataaagtggggggcggggggggcgggtggttggagatgaggaggagatggtaggcttgattcaaattatggaaatgtatttataatgcaccaacttgtaaagacactgttgttccctacccagcagccactagaatttgttcaggtgtcaggcggttggtgcttcaagggagatcaggcccctcccaggaccaggatgaaccatgattacttcccagccaatttcatagcatttctcttgccaatgaatggcttagatataagcatatgatgaatttgtttctaatacagatctgagaaagaaatctgttaaggaacttctggtaaagtttttatctttcttaaaaagtgacagaagaaaaggaagttgtataaatatacttagagctgctgtagtcatcttgagaccataagaggataaaactgagatcaaaaactactgtgctgaggatgggtgactagaaagaaggaaagaatctggattcttgatgcatgtttgtactactagaatcattctatcactaccttcttattatataattcaataaatctcttattatttaagctattttaaatgaagccttctgttatatgcagcctaaacaaatatactgattcaagctcccagcaaattctgtcacacataattcaaggaacgtttgttaataacttcatactattatatggggaataaatgattagtcaagaaagactttctgttttgaaaaattctggaaagatgataatacagtatgtagatttattgtcatggctaatatacatctacatataacatgaattaccttggagtagtaataaaagggcagagtaataacttgtgcagagccctagactagaaaagttgaaaatataaaatggaggaaaaagtgagttatgagattcagtaatatgaaagtataagaaataaaagaatccaaaagccatagaaggttgaaactgaaaagaattttagaaagcgtctaggccaggtgtggtggctcacacctgtaatcctagcactttgggaggccgaggcaggcagattgcttgaggccaggagttccagaccagcctggccaacatggtgaaacctcatctctactaaaatacgaaaacataactaggcgtggtggtgcatgcctgtaatcccagctacttaggtggctgaggtggaaggattgcttcaacctagggaggcagaggttgtagtgagccaagatcgtaccacttcattccagcctgggtgacagagtgagacactgtttcaaaaaataaaaagagagtctagcctaaaccccttaattatacagattgaaaaccagtcctggagaaattggaagtcctcaaagagtttaccattaatggtggaaccaggacttccacacaatgttctgacttcctttagagcactttttattatatcatatagttccttacttctcactattaatagagattattttactaagagtaagtataataagagctgatcagaagacctgagagacataatggagtttcaattctaatttgctgttggctccttgaaatgctttgttgagaaggagtaaaaagcttacaaaacacacacacacacacacacacacacacacacacacacacacacacacaatttcttaattatgtctaccatgggcatgggatggtaggaatgccatgtaactagtttccatggatggaaaccacctaatgggaaatagagaaaaagaaaaagaaaagaaattgtgtgtaaattttcagctcattttggcttagattacatgatgaaacttatttctttgaaaaactcatttgattttgaattagattatatggaacttctcctttgtcaattttaatttcttgtcttgttttagtttgcttttctgagcagtagatatcctcccaattggagattccgcaaaattagtacttagtcatcttggttcctttcaagtagaaaagtttcttttaaatacttcaaatcattggtatgcacatttgttgcaaaaaaaaacctcattctggaaaatgttgcttattttattatccaaaaaataggtatttattaatatactgcatttcttttaaataaaataaattacagattttcttccagcatccacttatttggaattgggtacatatgaagaaaagacttcttataatatggaattatttcaaaagctattattacttcttataaatataaagcatacaagaaattctcaccattttctaagatttacattagaaagatataagtattgtcttttagaatactgtttttatttttctaaatattccttataacttacttattaattttatcctttctttgttataaatatccattttttttaaagacccatactatcttttcctatgcaatttaacctaacatattttctgtaaatgaggttatttagttatccatttttctacctcctgttgcttggcagtcctcaaaaccattgcagatctttctagagagcagtttttaagaacagtgctttacttttcaactcttgatcaacctgatgagaattctttgaataaaccagaaggaaggctaaagagacaaaagaatactatagtttccttaaagttaatgagccagaatcctttggcccactttggcattgaacaatgtgaataaaatggccactctcacatcagtaatttacattttatacagtgtgtactttacactgatatttacaaagaggaaaaacaacagttttttacatgtaagaggagctccttggcagataaaagaaaaacttactcccattagtacaacactggagtttaaatctagagaacaagtacttcagaacctagtagaaaaagtccctgatttgtactttgtatgaacaattaggtttgagaatattgctatataatcacagaaaatactggctattatactacgtgaagtcttcagtgacaaagagagaaacagaaaaaatagttaatgccataacaatgaaaatgtggaatgtgaggaacgcccagtgaccgtaaatatctaccttaataagcctgacaatttgtatacagttcatgcaattaacaagtgtgataaatatgattattactctcaagttgaaatcaattttcttggctaaaagcaaagaattgttattgagcagatgggattacttttctttgccaatttatcttcataaaactcaatcaatgccttgccttaaaaatgtcaaataactcagatttcaggataacacatacaaactaatctcttctgcctgtctctacctgatcactccctacttcaaaagctccaacaacatagtataactgacacaaatcaaagcaaaaactatttttctcactgctacatggtcttatcaataatccagtatttcaatatctaataaaagataccacaattcaaagcagtaatgtgccccaagctaccgatccacaacatatatattgatatctaaaaatatatggatataacttgttatctactaaataagtttctttgcagtgtggtgttaatagccagaattttaaatacataaaaacttgggttcaaatcctaactctgccacttaaatgctatatgacaattggtcaagttacttaacctctctctggtctcaagtttcttgtctgtaaagctgtaatagcttttagagtgctcttctgaatattaaaaaggcattatactcttagcataatgtctacatagagtaaatatttaacaacaaaataacaaatattaggtgtgttattggagaattggagttttaaataaaggagttgtccctaaggtacattcaatttaactatgatatttaaaacttcaatttttcacattatttttccaggaaaatatttcactcttatttctccataatttgttttgaattgtaaaagagatttgcaagcggctgaagcagttacactatactgtatatctgcaggatgggcaactgattttttttttcttcttttttttttttttttgagacagagtctcactctgttgcccagactggagtgcagtggtgcgatctcgctgcaacctctgcctctcaggttctagggattctctgcatcagccccctgagtagctgggactgcaggcacacgccaccacgcctggctaatttttgtattgattttcaagatttgtcaagagctcctaatattttcttttctcaaacacatcttaggactaccatgcatatcagtcagtcagctactctggaggtctgctgcaaggatacacaccttccattcccacccatcagatacttgtctcctttctcccccactccaagacagcaaccttccagctctagataaaaagagctagtctttcttgcataagaacaacaaagacaaaaaccattttggtagtgtatactgcagattttaaccaaaacttctctgaagacctctgatttcctaaaaaacctcttcatcccagtgcagttgctctttcctaaatgagcaaccgcgcatctggtcaaatttggtgaatattctgtgctccagaaacaactgattccatcccctttaatctcttcttctcttatatccatctccctccttgttgtttctctccatgtttacaactagttcattgatttaaaaaccaatgtaatacacaaggaagtatgcacgacaatgtttagtgtagtatggtttgcaatattaaaaaaggccatcagtaagaaaatagttaaaggataaacttgatatacatactatgctgcaatttaagaaaactggtatagatttatacgtactaaaataaaataatctccaaaacatagtaagtgcaaagatcaatcacaraataacatctgtagtatatcacttttgatttttaaaaattacccctaattctaaatgttcatatatataaatattcagttaaaaattctgaaaagatactgctatggtttgaatgtttgttccatccaaaactcaggctgaagtttaattgccattgtaacagtattaagaggtaggactcttttttttttttttttggtgacagggtctcacttcaacacccaggttagagtgcagtggcatgatcatagctcactgtggcctcagcttcccaagctcaggtgattctcccacctcagcttccagagtagctggaactacaggcacatgccaccatgcccagctattttgttgtatttttttgtattgatagggtttcttcatgttgctcaggcaggttggtctcgaactccttacctcaagtgatccacccacctcagcctcccaaagtgctgagattacaggtgtgagccaccacatccagcaagagttgggacttctaagaggtgttaggtcatgtgagctttgccctgatgtaagggttaatcctgttatcactggagcaggtttgttataaaagagtgagacgtttggtcccctttcctctctctctcccaatctgtctatctctctcccttttgctttctgccatgtggtgatgcaacaaaaggacccttaacagatgccagcaccttgattttagatttcccagcctccagaactgtgagccaataaatttcagctcatgataaattacctagtctcaagtattctgttagagcagcacaaaatggattaaggcagatatacaccatattgtatccatcactaagtggatactttcaagaaagacagcaagactaaggagcatgaaaaaggactttctcatattctgaattttaaaaatattttatgacatgaatatatttatctattacctatgtaataaaactagacattaagagaaaaatctcatggtagaaatcttaggaaatagagaaaaattagagaaaattaagaaaaagcatgcataatttcacaaaccaatggtagccactgtaaaaaaatgttatttcattctaatacatttctacacacatatgcacacagtgcatttttgaaaacataactgagtcttttctaattgacctcttactctacaaaatttgaaatagccaaaacaaatttttgattcctataaagagatagcactagagctggaagagatggctcatgcctgtaatccctacactttgcatgactgaggccagagaattgcttgaggccaggagtttgagaccagcctgggcaacatagcaggacccatctctacaaaattaataataataataataataataataagctgggcataatggtgtgtgcctattgtccttgctacccagaggctgaggcaggaggactggttgagccctggaagttcaaggctgcagtaagctatgattgcattacactctacccagtgtcaaggaaaggaaaggaaaggaggggagaggaggggagaggagaggagaggagaggagaggagaggagaaggggaatgggcaggggcaggggcaaggcaaggaaaggggcaggggcagaggcaagggaaggggaaagggcactaggacctatgagccaacataggctatggcttccactagtacaacttaaaactcagctgaagacatgacacatagaaaagggttgctgtgtctgtacacacacacgtttcccatgttcccaatcccagtctgtggtcagtgaaagtgaagattgcctcagagcctgcattatctcaagctactgacctaattgctaatgctttactctggyctatttcctgcmtgacctcagaatgtgtcagtgtaaattccatagtaagacagtagttgcacattttggagtgtggattctgctttgaaacacaaataagtgtgatgaacgtgaccctggcactctgtagccctcagtttcctcaacgctaaattgatcactacagttccttctagtgtaaacagtcccacgaagaatcgtgctgaatggatgactacataatggcctgctcctagagttcttaaatcaatccttaaaactggctgcaaaatgacttcactcctttaacagtgtgggacttgtctctgttctccagaatgctcaccagatggtgaagaagtatctctctacctaccaacatcgtcatattgcttcttgccactcgctactcaaaaaytgtgaaaaacctgtgggagcaagtatcagctgaaaagggtggctttctccttaggcaaaagctrcagggcaaaacgggggccccaaacttctatcacgtcaaagacatgaaacagatgatccctagttttgatcttctttgaagtttattaaaaacaagcttgaatctgtaccaatcctgacaggtgtgaatgtaagactcacaaatgagaaatgctaagctttcctaatgttcaatttaatcttatagaccatgaaacatgttataattaaagatctgaactattaatatgaaggagatagcatatattcttaccccaaatatgactaactaggtaaaatcttcaaaatataatcatggcctgattatcagccattgtggaggagaattttaaaaagttcttcattgacatcccaagtttatgttttagacacttctaatcaaacatgaatagattaacttcaagtaaaaattaatagtcacattattgattatcatgattggaaatgtatttgaccagaacaatgaggaaagagcatagagtcctgctatcttcaagtatgaatttacacttttaactgatgtcaagtcatccatagtatgaaaactcatttatttttatttgaaaaatttaaaaccatcaaaatggatagtgtgggagccaaataatatataagcaatattttatgagaactacaaaactattaagagcagtaactagaattcggttactgccgttccttatttcagaagagaaagtcaaatgttttctgatatttaagaagtaataacttcctgttgttcagttatgctttctataattatatatgataagcaacagaaaaataggtctggttttggctgtaatgtgtatattcaattcaatattaatttggactttaaatcattttgctatcaaatattttgaacctcatgaccaggaagtaatcaggtaaaaaaaaaaaagaaaaaaagtgggtttgttacctgacctatctcttaagttcaaactttctataggtatttttctctacctttgtccatatggttatacaattatcactagatgcttgaattactaaatggttttgtatatcttttcctcaaatttatatttgtcctattattggcttagtctctcaaagtattacttttatgatattgctataatggtcctctatagtataaagttgagcccacaccatttatcctgccacttaacaatgtccttaatgtagattatatggtttggccatgccctaaccaaaatctcatcttgaattgtaatccccataatccccatgtgttgcgggagggactgggtgaagataattgaatcatagggcagtttcccccatgctgttctcatgataatgaatgagtttcacaagatctgatggttatataagcttctggaattttccctgctggtgcttactctctcctgctgccctgtaaagaggtgcattctgccatgattataagtttcctgaggtctccccagccatgcagaactgtgagtcaattaaacctcttttctttataaattacccagtctagggtatttcttcacagcagcatgagaatggcctaatacagtagtatatcacacttattaaagagttgatagtaaaatagcactctcagtacaataagaatagaatagttccttttcatggtaatgaatagcttttcttcgacatctataattaacaatgaaatcagaaacaaaaagaagctgtctccactattactgaatgttgctcagaaaattctaacgtaagcaaccaaacaagaaaaccaaatatgctgtacaaatatttttaagagagaaggaaatcattctattttaagataaaaattctgtaactcaaaattcaggagaatcaactgaaaggtataaaaaaggtagaccattatgatttataagaaaggtcaaacattataaagcatgtatccacaacaggtttttttctatataccagttagaaaatagataaatgatcctattcataatagtaataaaacatatcaaatatgtataaataaacaacgaaaaatgtaaaactcttgtataaatattattgcaaaacatcactgaaggacatttttaaaaacttgaagaatatatctagtttcctacatgggaagagtcaatattataaagatatcaagtcttagattaatctatgagttaaatgcagttacttttgccctaaaatgttaaaaggctcttaattatgcaattcgaaatgtgatgtctactttcttcttgaaagcatttttcctggaaccttctgatgactctaacttaggctgcctgctttctaggcctactactacacagttgtcatactgggatttattttcataaacatctgggttggttccaatgctctttgtatcctaggttttctgtataggattcccgttgctttgttttgcttgaatatatcttcgagtaatacttccttttaattaggaagaatctgtaggaggtaaagttgtaaacttgagtccttccatgtttaaatacatctttagtttgtcttaacacttgatagtttgactatcaattttgggttctagttcttcttcctgagaactttgaaaccttgcctagtctgcattcacttctaatcttgctgatgagaagtttgatacctttgaaagatcctttttttttgttctctggaaggattaatttcttatacttagaattccaaaattttcatcagcatgtgtatacacatctagatatgtatccttttttccttgttcggtgttggatgaaacttttcaatctgaggacttgaattactcttcaggtcaaggattttttttctgttattttcccacatcctttcccattcctccacttctaccacattcttcatatcttttttacttttccatcrtattttatatccttggctttttgctctatattctaagatatttgcttaattcaatattcaagaatgaatattacttgaattgcattttatccaatctttatatatacatatatattcagtattctnctatttatggaaatcagatcatacttaatggttatattctccccctgaatatctctgaaaatttaatattgacaaatttttcccacacttttcattgtctctgtttcttctggaaagcagaagataaattgtctcaggaaaataaatttgtcctgtttatttattagttcctttttgtttaggctactggtttttttgtttggtttggttttttgtcttttttcaaatgtctggtgatcctttcttgactgggaatatttgtaatttaagaactaggagtttcttaagtagttggcagggatatcataaggagctctgtagtacttataaactgcttataagcaacttaatgcaatttcaatcaaaatcttaatgggtttttttgggggggacttgacaagtagattgtttgtataatttagcacaacgatgtgagaataacccaggaaattctaaaaaataagattaagagggaatatgttctcccagatattaaaatgtatttcttaaaatccataataattataacatggggctttttgtctagaaataggatgtaaagattaaaaaaggaactaaccataaacagtagaagtggcatttcaagccaataaggaaataatagattatgtaatacctaggattctgacaatttagaaaatctaggaaaagaacatcagagccctgaaataaagtaaaataaattccataattattagagatataaatatatgatgtaaaatgattaaatactagaagaaaatattggtgttggaaaagaattgctaaggatttataaaatatatttatatagagactatataaacaatataaacatacaggctacatagggactatttaaacttctatttattaaaatagagtatctgtaaaagtaaaaatagaaatgaataaatggcaaaaaantgtaaaaaacaaacataaatgaaaagttaatattcttaatctctaaagaacactctaaaatcaataagaggccaggggtggtggctcacacctgtaatcccagcacttcgagaggcagaggcagtcagatcacttgagtccaggagtttgagaccagcctgggcaacaaagtgagacacctgtctcctaaaaaataaataaaaataaaatcaacaagaaaaaacaaatcagcccacgaataaataataaaataataaaaagcaaatatgtataattgccattagacacacaaaacagattttaatattcttgaagctaaattaattcttattaaaacaaaatactatgtgattcatcaaataaagagaacaattaaaatgataaaatatagcaacggaaataatgtagaaatagagactgctgatgaagtatatataaactttctgcagggcaatatgacaataatagcaaaaataaatctttaaaatattgggcaattctttagtttgacaattctaattctagaaatatatagtaagaaaacaacccagccttgctataaagactctacacaaagatattcatcacaatagtgcttataatgtgaaatctggggagagcttcaaatatttaataatagaaaattgcttaagtgtagtatattcatgtaaggaaatgccattaaaatgttatatagagaattgtatttaatggtaagaaaagtgttcatgatgcaatatactgtgaaattttaaaagcagattataaaatattaccttcagtataatctcattgttgttagtaaaactccttctctctctacatacacactctcacacacagagacagaaaaattatctctcaatggcataattattgacagttcgttttctcccccttgcttattattattttgtaatagatatgctatagccactcaataaatatttgttactaatttcaaaaagtatgtattattatatccaggttgttcatggaatttatcatgcaaacaactaccctcttgagagagtcaaaagtggacactataaattatgaattcatataaactatatcaggacaatgggcataaactgagtgtcccaggcacggcaaaatgtgcggataccctggagatgtatcttgactttaagaagtttacaatctttcttggggatagaagattaaaaaacatgaaaccattagaaataatctcccacaattagttttgtaaaagcaagtgcttaattgtacttgacaaacattagatgttactggaggtctaagaagtaagagctgaatactcgtcagaaaagctccctggaggaagtggggactgagtgatacttttagaataggtaagaaaaagaataatgagaacttttcaaatggaggttggggttgtagaaggaaaagaatcaagtattcagaggtagctgataacgatgttgtatatataaaatcaccctgacttttgcaaggggtccgtctatacagaagagtaaaaagtaaacaatctattaacaatgtactatcactgcctccactttacacaggagaaaatcgaggctttagaaggttacataacctgccaagggtcacatagctaaaagtggagagctgagatttgaacctaaggagttggtttcagagtctatgctttccaccctatgctgtactgcccactacagtcaagctctggcttcttgtataaatctgatgtcactctttgtgggactgcttataacatttcctcacccagaatccatacctcctcctttctgctctgtcagagctctttgtctattcacacacagttcaaagaataccttctccatcaaatttttctaacaattccaatcttggaattctctcctaccttggagttgagaacaccactctcctaaatttctgcctacttctcagccactacttctcaatctctttgttggattcttctttctctatatttttstttttttagtctactcattgcctgtgtgagtaccttcacccccaaaactacaatacctacctaccattgtgctgaaaaccccagcttacattgctcttccacattccataaatttctatctggatgtgcacagacacctcaaacttcatatttccaatactggcatttaccctatctgcagtttttactatcttatggacagcagatgccagaaatctaatcactgaaaccagaaacccatgtacaattcttgagtcctccctctctcaagcctaaaatcctggaagtcaccaagttctgtctattttactctataaataactattagattcttctttcatctgaactcccttagttcaagccctctttgtttctcatatgattattgtagtaggctctgaactggttttcctggtacctgtctttcccctgcctactccaattctacctccacatcaacatttctcaaatttgaggggtcatagacttccaaggacatttccacaatccctgagaagtatacagtttccatatgagaaatcactgtagctaaaagttaaatacttttcttcagttgattatgtatagctaaggcaataattcaagcattagtaaatacaaagccaaaatgcaggcacattacgcagaaaatgcctgttcttgggtttttaaaaaatacgttaaaaaaataaggccagatgtggtgactcccacctgtcatcccagcactttgggaggcygaggtgggatgattgcttgagaccaggagttcgagaccagccaagaaaacatagggagaccttgtctctacaaaaatttttaaaaattagccaggcacagtggtgcgtgcttatagtcccagctacttgggaggctgaggcaggaggatcgtttgagcctgggaggtcaaggctgcaatgagccatgattgccactgctctccagcctgggtgacagagcaagaccctatctcaataaataaataagaccacaaaggaaaaaaattcttacagagaattattgaagtataaattgtgtcaaaattgaagaatataataaaccctaagattaatagtcctgtccttgagaaagatcatcaagtgatgcccccatgctttaaaaaatattccaagctttttagcataatatctaacatttcttagcagttcctaataggttacttctctgtagttacctctctcactccttccccatcacctatagtgccacaatctgtaacctgtttgaggctctctcacacctttcatactgcaatatttgctcgaactattgacccccaaccttactcatctttcctttctaactaactaacttctcctcatcctcaaagccccagctcaagaattttcatttctggaagaatctctgattttcttctcttctctagtcttgaaatggtatgtgtgaacccacagcttgttgtaatgtcattgtcctttctgtttaacaccctcagttgctggtccttgaagtctgggactgtcttaatctactttaaagtcttcaagccaagtacaattcctaggcatgcaatacatgtttgttaaatagatggatgacctttatttatatttatctttcccttttctgctacaattagttaactcattcatttcttcattcactaataaccacttatctgttattttctgggaatacaaaaattcataaaacatcatccttgcctccaaaaaacactttattattgtgccatccttctctctctttctctttctctccttctctaattatctagttgtgtaggtattttcttcaaaggaataacaggtactcagaggaacacttatacactgttgatgggagtgtaaattagttcaaccattgtggaagacagtgtggcaattcctcaaagacctaaaaacagaactagcattcaacccagcaatctcatttctgggtatatgcccaaaggaatataaatcattctattataaagacacatgcatgtgtatgttcattacagcagcattaacaatagcaaagacatagaatcaacctaaatgcccaacagtagtagacaggataaagcaaatgtggtacataaacaccatggaatactatgaagccataaaaaagaatgagatagtgtcctttccaggaacactgatggagctggaggccaatatccttagcaaactaacacaggaactgcatgttctcacttgtaagtgggagctaaatgatgacaactcatggacacatagagggaaacaacagacactgtgacctatcagagggtggagggtgggaggagtgagaggatcaggaaaatcaactaatgggtattaggtgtaatatgtgggtgatgaaataatctgtactacaaaccccatgacacaagtttacctatgtaacaaatctgtacatgtacccctgaacttaaaagttaaaaagaaataaaaaataaacagaatagtagggattcattacaatatcttctctcctcctcataattcttaaacctgtgtagaagttcaatacatatttgtggaatagccttattacgcctttagggaatggagcaatgccttgcctattaatctatacttctatcagagtttcctgctgtatggaaaacctgagtgttacacttcaaacaaatgaggcaatttatacatttttgttgttgttgttgttgttgtttttggcataaatgtgctaagtgagctggagtttcagaagagaaactgaatgttatatgtgaatccaggtcagtagcttggctctgactacaatactgatttcattcaagataaggaaactaattggtatcaattttagttgacattatatgttagttttataatattcaggaatttttgaaggattatttgatttttatttttatagatgttcttgctctttaacactaaataatgaggaaagataatagggctaacatttattaagcatttatgttggacaggcactgctttaagtatttttatatgtatcaactcattgaattttcacaactcttagatctatttgatagctggggaaactgaggcacagagaacctcaagtaacttgcccaaggtaagccagctagttagcatggaccagtgattcaaaaacaggcagtctgtactccttacaactgtattatgctgcctataaaaggaccactagactaataattatgaaaccagatttttaatcttaaattagccatataatagtagagtgcatttaaggatgtcatctgagtttcattgtccttgtaccccttacagcctgtgagaaggaacctttatatagtctttcataaactgtaaagtgttataaattcaaagatttcttataatatgttaaaattacttttaagagttgagaagtccaaataaaagcagagagatgagaggaaacactagcactaaatgttcagacacccactgaccaygtcaagctgcacattttgttgctaaacctaagggagagattagatatgaggagagtgggaagcaagaaggtatgaagtctgggtatttagggactaatagaaatgattttctcgattagtttaagaacattagcaattacttacgggataagcacagttaaaggaatttctggaaggaataaaactataaaaattagtcaaattgttaaaatatcagaactgtgtaaaagcatataaagtttcatcatatctttcttttgaaaaacaaacaaacacttcatgttctagccagttgctaatagtgatcagttgatgaatacacctcatgtttcacgcatataaaattttacaccatgtctagtccataggcattagtgtaggagtcagaatacaacctgaattctgttcgcagctttgtgccttgtcgataaagcagtggacatctctccacagggagatatgtttcctcccgtgatatagaggatgttgattcacttgtctcctctctatttcgaaaagatgctctgaagattagtgagacaatggctgtaaagctctttgcactgtttacaacataaatcatacacagacatactggcatgagaaacgctatcatcatctcttttatacatgagaacaaccataaggaaaacaaacctcagagacagtcctgtattataaaaatgttgggtagagatgccaaaagttgtagggtaggaaacagcaacaacaacaacaagacggaatccaaagaatatttgcattctataatatattctacagagtytcagacgggaccttcgttgagtgctcccaagtattatcagtagccatgttttttttttctttttcttttttttttttttttttttggtaaaagggataaatagtgatgtcaggagatgctgcaaaatatattccagtgataagcatatggcaagcaattaatggatgaattcgcctctcttattgccatgttgtgacaaatactctaacttatttggcctttggctccctaaagggtgctcagaaatgctgtttagaaagtacttttcatgaagagctacaacaacaacaaaaacaaatacaattcaaatatctactaaacatatgaaggagtactcactctcattagtaatcagagaaatgcaatgatcccattatagagccctgtcatttgaaaaaaaagaaagaaaatccaagtgttttttattagaacgtggagcaacaggaattctcattaccttctcaaccactttgtcaaatgctttctgcttatctgctgaagttaaagatatgcatgacccatgaatccactcctaggtatattcccccacaaaaatgtacgcttatgtgcatcaagatacacgcacataagtgttcgaaatatctttattcataatatttccaaactggatatgttcaactgcataaagaaagaagattggacagtaaattgtggttcctttatacaacagaatgctatatatcatgatatatattatgatgtgcaatcctcagctacatacaacattgatgaattttacaactataatattgcacaaaaggagcaaaacacaggagtatctacaagatgagtccatttacataaaatgcaaaacaaactaaattgaactgttgttttggcatgcatacatacgtggtaaatcataaagaaaagtaggaaaagtaaaagtaaagtcaagatagtggtgacctatctggagaggatgaaacaggaaattatagggtctttctgaggggtgatcatagtaggtatttactttagaacaatttgttaaacttaaaatttaaattttacatactttcttaaattttgttatatttcacaatttaaaaatttataaaatgataattttacaaagcctaaaagatgaattatttgggggcttttacttctctttcatctgtacaactgctgatgaaaatcaccaggtgtgtataacatgaagcatctccttaaatgacatgcatttattgggaaaaaacacaaagtccaaatggtaaaatgttagcaaggtaaaacactgaagatttttctccccaaaactgccaaacaagtctggtttaactgaaattgacagcaaagacaacagagcacacttaattgaattttaatctcagtgatctctaagccatgtttgaaacataaacagacatgtcagagttctttatgatgttggacatgaattcattttcataattcaaaggcatactttgcttatgaatctctttaacaagctttggctgaatattcttttcttccagatgtttgctgttgtatacacacagcttccatctctttgcagatgatttaaaacatagttagaaagagtacatttatttaacaaaagagtaagagtacagaattcaaatagatcgtctgtgggtgtatataatgatgagtacataagtctcatgcagtcctcataaagacagcatctattaatctgaagaagtttctcttactaatttgcaaacctaaaagcattttacattactaagatattaataaataggtcaattaatacttttgatagagtagagagactcctaaataatggacatgaaaaatgattttgtaaaagtayggtttcattttaaatccctgcttaagcaatttgtaggaggcaagatagtgtggcagttgagaggatggtctctgaaatcagatctgaatttgaataccacctctaccatttactaacctaaacaagtcatattacttctctgtgtctcaatagctacttcctgaggtgttcttacaaaaacacaaataaataatccatgtaaagaactttgcacagtgcaaatacatagtgagcacgcattgagttttatttatcatcatcatcatcttgctgtacttttgtaaactcaccttctcccgtctttttctactctaaggtgctcttccaagctactttcctcctcagctatcgttcccctggatttccagtaagagagggtgaaatcatgcctgcttatcttctttctcttttactgatacttcactgaagtgaaagtaaaggaataaaaacacaacacacccacccacaaaggcacaaataataaaggaaacaagatcagcaaaggagagatttctactgattttttgaaatcagaaaatagctgaagtgccttagcataatcgaggaaatggttacggagagtaaattccaagagaaagtggactaatgtgttctcccgaatccagaaagacttactgcttggaggcagcagaattaaggaaggcaggagtttagcgaggggctgaaagtgtattaaaattatatggagcctttggatccaaactaactacttcccttacctactggaagcggagtctttcttttttggaggaaatcggctagagagatttgaaactgatgatactaggcactgtagcaaactaggagaggctgcaggttgcgaaataggtgcttatttgaaagcctatagagtttgcaataagaaacccaacttttttatttgtcatgctccccagacattagcagtcagttatatgccccaggcgcaaatctcgcaggcagaaagtggggtaccccctaatcatgaccttggggaaacatttcaaagaacacaccggctttgattgaacaacctatgatgcaacagtgcaaccctacagttgacgagccctatccatgatcacagaacttctgacattgtttcttgccatcattgtcattgttgctttgttttgtgtgtgtgtgcatatgcacctgtatatgtcttgcttttaactaagaatgaacagcctcttaaggaaactctccataatgaagaagagaaactagaagaagcaaacatcaactgaagaaagaaatctacaggaaagagagagacagaggaaaacctcaagaggataataatctgtgaccttagataaaacacacttctgacataagaacatataccattaaaaaggagaggatgaggctgggcatgttggctcatgcctgtaatcccagcactttgggaggctgaggtgggcggatcatgaggtcaagagatcgagatcaccctggccaacatggtgaaaccccatctctactaaaaatacaaaaattagctgggtgtggtggcatgctcctgtagtcccagttactcgggaggctgaggcaggagaattgcttgaacctgggaggcagaggttgcagtgagccaagattatgccactgcactccagcctggtgacagagcaagactccgtctcaaaaaaaaaaaaaaaaaaaaaaaaaaaaaggagagaatgagagtgctaaattatttttaaatcatgaccaaaataaacattttaatagtaaggttggaaaataaaaatgtgtgtgaacaaatcttctagaagaccaaaaaacaaaaagacaaaaaaggaagaaaacaattaagaaattaaaggatatgatctaggagatccaactaagataatgagaattcaaggaagaaagaacagagaaaatagagggcataaaattatcaatgaataagagcaaacatttcagaactgaaggactcatatctctggagtgaaaaggtctattgcgtgcccagggcaatggataaaaatgcagaccaagacaattgatcatgaaatgtgggaacttcagtaaagaaaagaaggtcacaaaaatttctacacagaaaaagatcaggatttcaccaatagaaaatactggagtgatgcctacaaaatgttcaaaaaaatacatttttaacatagaatccaattgcagttaatccatgcctgagacaaaaaaaggtttaaacaaagggctgcctctgaatagtatatagaaaagatttctgaacagaaaatcttaaaaactagcttttatccccaacttggatactaaatatagagacaggcaagaattaggggtcttcttgtcattcttctgagactctggagctcctgagacttctttttcactaacaccattgaatccgggaatcaacaagctgcacaaagttataaagattgccagacttcatgtttctggaaaaaaaaaagtactattttttcatacagctgagacctctgaaaagatggctcaatgggcaagatgccatgagaaatcaaagccaaatactcattctgaagtcagttttgctcagactttgtatactgccactcaatttttcaagtcatcagaaacataactaagaatgagtgactttttgctatyaactaatgacccaccattcaacgatcttgtatgacaaagtagaggagtatcttcttatttttaggcttattaaattacaatggaaaatattcattaacaatctcataatgaggcattctagatgcttattcttacctaaagggaatggaacaaaaaataaccaaaaactaaaaagatgaagacaaaagcctttcttggtattatagtattcttttacaaaggatatggtttatcatagtaattgattccctctgttacactagagatactattatattaaatgcctaaaggttaaacttaggtaacagtggagctatagttctttcagaaataaaataattaaatagctatgtatgccaagaaaccttactttgaacatttctattgtaccatctcattattgctggctgcctgattagcaagcagtaaacttgggtaatagctttcctctgatatcacttcaagtctactcgagttctagaattacccagactaccaggactttacttgcacaatatgctgaaatgtttataacattatgctttcccctcctaattctcaagaccattttgataactggctaagactggataatatcaacaaatatgaaataattataagaatcattctttcttaaaataagaagagtttccagaaacagaaactaaaacagaattcaggctaagctgctaaataggctatctcagggattctcagctcattcttgatgaggatagattgctttttatttcccttaagtgttccgtatttatttcacaaatattacttaactgtgtaccatgtacaaagccgtgtgctagttaagctggttactgtggaagaaataaagggagtgggagcatctagcttttttcttcaaaggagatgggggaatctgtgggagttagtggtaggggcacctacagaggaaatwgctgaaaaggaggagctggggaagatgaggatgaggaactaagttgtgaataaaggaagggcagagcaatggtttttttaataatattggaatgggatttgtttttagcactgctcccctttcccttaacagtccccttgagctacaaataaatgtaactggcaaagtggataataagacttcagaatcttctagctaaccatgatcaatgtgtcatg

SEQ ID NO: 5 - DNA, 100000 bp, Homo sapiens
  modified_base (38332)..(38332): a, c, g, t, unknown or other
  modified_base (45756)..(45756): a, c, g, t, unknown or other
  modified_base (46338)..(46338): a, c, g, t, unknown or other
  modified_base (61700)..(61700): a, c, g, t, unknown or other
  modified_base (72789)..(72789): a, c, g, t, unknown or other
  modified_base (79870)..(79870): a, c, g, t, unknown or other
  modified_base (99765)..(99765): a, c, g, t, unknown or other
ggcttatgtctacaatcccagcactttgggaggccgaagcaggcagatcacttgaggtcaggagtttgagaccagcctagccaacatggtgaaaccctgtctctacaaaaaaatacaaaattagccaggcgtggtggcacacaagaggcttaggtggaagaatcgcttgaacccaggaggcagaggtttcagtgagccaagattaccccactgcactccagcctgggtgayagagtgaggccctgtctcaaaaaaagaggaagaaaggaagggagggaaggagggagggaggaaggagcacatacttgtctgaggatcagtaataatacrtataataataacatctgactttcattgaaaacatattatgtgccaggtagtattctgagtgcttaaatctattgattcattctgtcctcacaactacaaggtagtcactgttactattcttttttatagaacagaaaattgaggcccaaagagatcaaataacttaccctgtccctaattagtaatggagctaggactcagaccatggtaagctggattcagagcctttgtacttaattgcaatgcctcttscatatgygctaggtagggaacaaggtgatagcagaatttaatagtcaggattgatgcagtattcctgaactagtatagaatgagctagattaaaaactcagcaattagaattcagtagcgaatcaaatcctgagataagtaggatttggcttatcctgtggccaattttcctcgtattaaacatataaattcatgggccttcacacccataaaagaataaattagtattataatttttaaaatatgattaaaattagtgctttctgaagtactggttaggtgtttctgtttgcaaagagaatttatggttttgtaagattagtttaatgttgatggtggaatagacaagagccaaaagacactagaagcaaagagaaaaatgaaaattaaactatagcaatccagcagttagttaataaggctgcagctcagatattcctgttcctcatccagtccttactttttttctccaatcacygttgtyaccctggtcagttttaattctgctaaataagctctccccactgaccctgttgcaactgtccttctttgttcctttttactattcctcaagattatttagtgtttctgcccagtttgcaaaatcctatttgtatatagccatatatactttgttcattgtcatattctgtttctgtttctactactgcaatttttaaaaaatgtggttttctttcttgaaatgctcagggggatagactccatttrgccttgatatttcttgtaggccatatgtatattatgcatgaaagtaaagattcaatctcataatatgacaaaaagttatgagtcataatacattagcagatatatttaccagtatatagttaattgtgcttctttctagaagtctggcaagacttccaaccacatgcagaggcaccaggagaaccaataaacacttttgaggcatgtttcattaatagaccagggaactgagacagaggaaaggkgtgacaactgtaatgctcttgaaaatatatttcatctgagcccagactttatttcaaaaattccaaaaatgtggctgttatggtaggaatttgaactayttggatttatttagtggcaatagaagatatgccacamaaaaaaagagcatagtgaatgtgaaaaagcctccttccagaagtcagacctcattatgcaaaagagaaccataagagagaaaagcccttaatatgtactaagtgtgggaraaccttcagcagggaatcaaatctcattatacacctgagaatccatactcaagagaaaacctacgagtgtgttgaatgtagaaaagctttctcccacaagtcacatctgttgaacgttagagaattcacaccagggagaaaccctatgagtgtggcgagtgtgggaaagcctttttccaaaacttacacctcagcatttacaggagaactcatactagaggaaaaccctatgtgtgtgatgaatatgggagagccttcwgcctgaagtcacacctctttgtacatcagagaatacacacaggagagaaawcttctgtgtgaactaagtgtgagagagctttcagtgaagtrtcatgccttattagacatcagaaaatttacactagagagaaaccttatacatgtaatgagtgttaaaaagttttttctcaaaagcctgacctcatacattacagaattcacacagggaaaaaaactcatgtaaatgcagtcaatgtgtaaaaaaaagccttcagacatagatcagccctctgtcgacataagaggactcataaagaaaaacatccctgaacaagaaataaatatgggaatatctttaactagaacttgtagtgatagaaagccttcagtcaaaagcaaaccttattatttatcaagaaatcttactgaggataagcctgtttaatatatttataaaagcgcgcagttatgtttctatagaaaacatattccagatgtgattcctaaatatttcttgaggatattacagaaaatacatttttattagagaataaatgttcactgtggaccacaaaggcttttaaaatattaataagtgaactagtcagaacaaacttagaaaacratatgtggacaacccacaagatatgaatgttactatatgtgccactacttattgctgtaagtcctggctgcactacattttgctatgcatcatataaaataagttatatgtgttggaattgcatatgtgaatctaaaaatttgtaaatataaaataattactatatatagaatgccatttactaagactttctacattaaatattaccatttttcccctaaagaaaatacaagttataaccaaaaatacagtgttcagtaagagttctaaagtgtaaaataaacttttttctgttgctttctggtatgtatgacttctgctgcttcttaatgagaagtacataaaggtgttaattacataaaatatataaatataaactagatatcatataagtctcagtagcaaaagaaaatagtcatggcctcttacaagactcactgcaatttaraaaggaattcttggtgggtacaattaccctttttacatactgttatggactgaattgtaccttcccaccarattcatatgttgaagccctaatcaccaatacctcagaatatgactgtatttggacatactgcctctaaagagtaattaaaataaaaccattaggatgtgtcctaatctaatctgactggtgttcttacaagacctagagagtaggacacacgaggagacatcaggggcaggtgtacacagagaaatgaccatgtgaagtggcagcaagagggctgctatctgctagccaagaagagaggcctccaaggaaaccaacccttttgcacattgatctcagacttccagcctccagaattgtgagaaaataaatttctgtcatttaagccactcactctaatattttgtaaggcagccctaggaaacaaatacaaacactactgctctttttccctggagtactttgtaagcttgagtatacaaagtataagtactacgtaagccaataatatgatagagtgcttgctatactgcacggcatctctatttggcattttctaattcaccttgtgacagattagtaagagagatattttcataaggattttacaattcacaaatattataaagactttttgcagagagaattgttcatttttaaaattccatctaacagtaggggtaggtattctgtaaatttccatgtgagtatccatgccattaaaaatcaacttgttccttatttataaattaaaagtggggcctcattcttctaaagcaaattttgacagggagttaagattacaaggcagaaacctacaagaggtgttaagagctcttattctggatttagacagatgtagattctgaatctgctctgagcctcaatagcacctagtttgttggatcattgcaaggattatacaatatcatgtatgtatggtgctcataagatgttagctattttatattatttaaggatataattcccattctagttatgaagacagacaaggaaacaactctaattaggattatattagagagaactgtagggagtcatgtgtatcattctgtttcattctcacaaccatgtcagtctttcagactcaggtgtgggcctggaaccactgccctgaattgcccctctacatctattctataattgcttgttcagaagcaataccattgctgataccccaaactccttatctttatctcatctactgatgagacccattgcttggagggtagttacatggaaagccattcacaaaacaccttattaactttgtgggtgaaaaaaaagtgtatcttaattgtattaagccactgagatttagggattgattattaatagcaaatagcaatcattttctagtagaaagaaattggtcctggaagtgtcctgctaatgtaataaaaacctaaaatatggcataggcctagtagttgagcagtgagaaaactgatgtcagaagtggaaagatgtttatctatgttttgtactagccaaacatttggtttgggccaggcgtggtggctcacacctgtaatttcagcactttgggaggtcaaggtaggcaaattgcttgagcccaggagttcaagaccagcctagacaatgtgatgaaaccctgtctctataaaaaatacaaaaattagccagatgtggtcgtgtatacctatagtcccagttactcaagagcctgaggcaggaggatttcttgagcccaggaggttgaggctacagtgagctgtgattttgtcgctgtactccagcctgggtgacagagcaagaccctgtctcaaacaaaacaaaacaaaacaaaacaaaacatttggtttgattgtctcctctacacatgcttactttgttgacagctccagaagataattagaaaacagagtattagtaatatttgctgttttactggctgtatttggaagctattgtaagaaaaagataaactcagagaaaattagtggattataagcaaaaatgaaagaaaatagagtcctgaaatttgagacctcatggagtttaaaaaatttgatttctagacttcaaatgttaggagaataatttaaatggttttgagtgtatcaaagacctaataaacatttgctagtgaaataaagtgactcagaagaaagattatattaagaaactgaaaccttctcgttcaagcttgataaccttacagtagtctgttattcacctaccctagctccatgatggagaagctcaattttaggcagctacagccaagaagactggggctcccatacccaacctagctcccacttgtagagcagaggctcttgccaaggtaagagaggctaagagtattgggacctcaattgccctcctcctcagcttttctctatagagtagatgtttcatgccaggaaaggcaagccaaaaaaaagatcattctcccagctcccactaataggatagaggctccagactggcaggagtacattaaaaagayctcaggccttcatcttcctaccaagatctcacttgcaggaaggagtatccctgctaagaagcttccccggattccactggtagggcagaggtgtcacttcaggaaaatccggckttcccctttgtcccccgcttctgtgcaagagtgtagatgttatatccagggaaagaagcaagatgggagggccagaagctcctcagctcagctsgggggctgactgtatttaatcataacatgaagggttgcatgaattaaggcattgttgaaaatagagatcttagtggcaagcacttaagagaattctaatagtttcataaaacaagtagcaacaaatgaaacagcaagtcacccggtttaacagagtgaacaagagaaagagctaaaactggaagtctgtgcatatgtctatgtttcacacattcaggaccaaccataacaggtactagctgaacttgagtggaattgaaagaatttcccaagccacacgctgatacattagcaaagagtggaagtcttactagctcaaggagtgtaagcacaacccctgaccaaacactggctaaatgttaagatattttgacccaacggtgacttctaggaagccaggcttggggtaaaagctacacactgtggggtggggggcggcggggggaaatagagtttacaaagttggtgcaagcaagccactaaacaaactaacaaaacagagccacatcaataatccctaaaggggatgtgtcagaatccagagttgctacaatatattatttcaaaaactattagagatgcaaaagaacaaaatagtataacccttgtaaaggaaaaacagcatcaataaaaactgcttttgaggaggtctagatgttggacctgtaaggcaaagatgccaaagaagctattacaaatatgttcaaaaaactaaagaaaaccatgttcaaagaatgaaaggaatgtatggtgacaatgactcatcaaatggagaatgttagtagaataaaaagtgtttaaagactcaaataaaaattctggagttgaamagtagaatacctgaaatgaagattcactttaggtactcaaaagtagatttgagctggcagaagaatcagtaagcttggggctcgatcattcgatattatacagtcttagaacagaaagaaaaaataatgaagaaaacctgagcagacttctggtttctagtctgacatgtaaagagcttggaagttgtcaatcctatcatcacaaccagaaaaaagtctgaaaaactggaaattaacaattcttagatccttcaaagaatcaaggtcacaggacaaaccactgccccagaaactagagagacaggtagatgctgagaatcacaggttcactgacagcggaagtccaccactaaagtcaatatattttaggaacacttaaactacaattgatgaattgctagagactagcaataaaagtgccagcattctagttgatgaaaatgttgtgaccagaggcttacatgaacctaatcctgtattcctcttggagcaattattcagtatttactaatacagtgtttgtggtggatttatttaacataagtactgtgaataataaaatcaactgtatatgaaatcttgactatccatttacatgtaggagaatcaacaaatggtattctccacaaatggaatcaacccctagaagttcctgagaaatccctgttgagtgggaaaggacctagagccaaggagacaaggttggaggtgactggtcctcttcctttgttcttccactgaaattacttgagaagcatcatgacacatccttatacacagggtatggtggaaaaataattggcagtcaaaaagacttaagtgtatgaagacttaagcatgatacacatggagaaggtgatggtgtaaagaatgacaatggcgtctgagtaacattctgaaggaggagggaagttcaaaaggtgggatggtgtgcctggatgagacacatgagggagaaggattttctatggtgcttctgttagtttagcaggtagaatgcccctgtgaagggtacaggaagcatgtggcagagtgggtgcctaagtctgggtttagggagactttagaaacaatttgaaacccagggtcttaccctctgttcacctcatagaacagtaaaatcccttggatcaggcaaactctgatgaaaaacccagactgccatctctctcccagatggccaattttccttctggtgctggcgaatgatgaagttgtcttcaggaaggcagaattctgctgsgtgctctcctcttctgaggagttataccaccacacagcctttgctcccagaaagagtcaccatcttgtgttctaacatggatcccttgtaagcccatacaaaccactccatccatacttaactgctttctccacaaaggcaactgagtctaggagccaatggactatctcactttattttttaaaatttacccagggcactttttcatgttctttcttctccctggaacttactagcattatggaacacaaggatgtgtttgtggtcatcttctctttacaagataggtcacatagacccataagtaggctgtgtatacttttcttacaaaggaggtgtcacttaccttgggaataccagccagccacatatgaaatcccagacacaggagacccctaagaaaaaggcgaggctgtctgtaactgccttagcaactaagccaccagtggattcaactcttaaaattacagcaccatggaaacacaaaatcacagaattttggatttgggtaacactagagagctcacataattaaataccttaatagaaaattctcatttactaattagaagtttttaaccatgtagtgtaaccatgtatacactattctcaaagagaatgggaatatcttcttcagttacttaatgaaaacatacaaggaatctgaaaccctaacataccagaatccatgggacaaaaggaaaattatttgatcatgggattcagaagcatttactggatcaaggtttagagatgctgaaagtagagaatcagtgttaggttttggagggaaggcaagggttaaaggaagacagagagagaaacagagcaactcaacagcaaacacaggtatattgcagacacctgtggaagcgggagacccgcttaatgccaaaacccaccaccacttacaagcagcagtacttacaggtatggctgggagaagtctggatagtgtggcttgctgcccggcaggatatcaataagatgtacccatgatagggtggtttgaccctttttctggtgggatgtcatcatggtgttccttgggcctttgcccagtaagacaggatagggaggtttctttagttgggcctttgcctggtagggtataataagaatgttttttttattgggcctttgtcttccttgtggtcaggtggccaggtaggatgtttctcatggcccaaacccccgtggaatgtttcactttgaccaaggtctgcaaaatagcaggggacttacaaaatggtgccgtttgcactaacacaaaggtgaatggcatggggaatggtaggtcaagaaagctgcttccttaatttatcccttctcttgaaatgtcttcattattaagactttcattttaactgcctttggagttaaaatataaaatatgaattttaacacagaagtgtgaatgctggtatttttgaaatcaagttcttataatcccaggctagtgacagcttgcctgggcaactaagtaacttaagttcataagtaaacactaactctgctgaaactaaataactcattttagcttctgaacattttaagcatttctcattctggataagaaagagaaatgctgaagcagaatttatttcatctgctttagatgaatttaggaatcccttgcaaggcataaaactaattttgtgatcctttgagtaatatggatttctgaggaaattctagattcagagaagtgctgggccagattttggttaaggcaatgacatggaaaaatttttcaaagaagaggtaaaaatatgtagtggagtttttttgttttttttttttcataatcaggagtttgagagggtataatggaagttgttaggttttgacgggaaggcgagggttaaagaaagacagggagagagagttagcagctctacagcaaacacaagttttatgtctagcacaagacctgcggaggttggggaccagcttaatgccaaagcccactgccgcttacaggctggggtacttataggtgtgggtgggaggggtctgggcagtatggcttgctgcctggcaggatgttgataagatgttcccatgatgagatggtttggtctttgtcctggcaaaatgtgatagtgatgttccttgggctttttcccagcagaatatggtaagaaattcaggtggttgagcaaaatgtttctcatggcctgaatccccatggaatgtttcactttgaccaatgtctgcgaaatgatggggggcttacaaagtggtacagtttggattaacattcttgccttctacttcagtctaaaaggaagaggggcattgttgattatctagctgcttcctgctgaataggggcactgtaatcagggcttgggttttgaagcagtgggtgtccaacttcagagttgttttcctggagatgttgataccagacttggtggggaaagatggtatcaatgtgtttctgggtggctgcctagacaaggtagttctgcctttgggagataaagtgggatatgaaggtaagtatacatgggccaattgtgagtattaggaggaagattaggggccctaagaaaggggtaaccagatatccctgtgccaagtgtagctgagatgcttagtcctgctaacaggggaatgaagtgtatagcccacttggtgtgtgtggaggaggaggaaatagggattactaaagaacctgaatggtttgattgttaggcaaaatgttaatgtttggagattgaaacaccagggtacatgttcctgaccaacttgccagtaggcaaagaagagagtttgttccacacagaaagaaaagactgggggttgacaggcaaagttgtaagtgaaggcagtgagccatgagaagccgggggttaaatcctgaacaaacttttgtcccaacttttttgtttttccaggttgaataactgttaacaaggatagtccctgttagggcctgatagggatattggtggtgaaggctgtctggttttagacagagagagagaaatgggtttttgttaacagccattgcggtcctgacagggaagaagaataaaggttgcagttgagggaattgtctgtgcatttttttagggagttcccttaagttggatgcatggagaacagtgctggcagagaagggaggggttgggaagggatgttttatggaattcagtttgtaacatgtttagtttacaggccatgagacgaaagagggtgccagccctgcgtgcgatggtgcaggtaggtttgatggattgcagggaaaggtgtttagccaagcaagattataaacaggttttgggaagggactggttgagtaggtgagatgcaggtttactttggatcaagtttctgtggttaggttaacaggaagggctgtgaactgctggatttgtgtggacaaacaaatttaacaattggaagaaagaggagagtgtgactgatttaagaggtaatgtgtgaggttgacaaaggaagcccaactgccagaggttatgggatttagagtatcccacagcaaagacaaaaggggaaaaagaagatttgagtacragggaaattttggaaggtrccctgcagccatagctcctgggttaatgtgaggaattggagtggactatccagggatgtggggagggaatatcaggaaagatctgaaacaaggtgtgagataacagatttgaacttggaggcagagagtgtaatggaccagggccttctggactggcaacttctggaattcttgttaagcatagtgaggttggtcctatgaaggaggaagaatattttgggggtgagaaaacttgtggatgtaagtctggtgctgtttttagtttggaatggtggatttagtgtggaaaggatgttagttttgttgccacaggagtagtcaggattacctggtgaggacccgtccacttaggttggagaggggagaaggaattggtgatttagacccagttccctggttgtaggggcagggaggagtgtttggaggatggacttttaggctggggcaagtaagcatttgcgtaccgtcttattagatgttgagtgaggtataatgccagccaagtatcctgtatcaargaggtggaggggcgggctgggggcagatacagggagattttggaggataaaagggcattggtacatgaattcaaatgggcttaggctgaggggcgtgtgagcaatggcttgtaaattcatgagtgccattggaagaagtgaagttcaggccattttaacctctaggaagtttggttatttgttgttttaaaaaggcattgacctatttacttttatctgaagattgggggcagtaaggaacatgaaaggcccatttaatgtttacagcctccaccaactgttggttaacctgtgaaacaaatgttggcccactgtctaaccggatggaggaggggagtccaaaccaggggatcatatgggtgaggagaatagaagtgatggtgtgtgccttttcggtggtggtaggaaaatcttttatccatccagagaatgtatctacaattgtcagaaggtaccaggcccattttatggggaccatgagggtaaagttgatctgcccgccctgccctggcaggtgtccttgggcctggtgtgtggggaaaggaggtggtttgatagctccctgagaggaagttgtttgagtgcaaatggaatatgccttagtaatacctatgagattggcagccatggcgggaaaatatatataagcttttaagagctagagtagggggcagtaaccggcatggaaatggttgtgcacatatgaaagtacagaaagttcctgggacttgggcaagacaattttattattggggtagaaccatcctcctccccaaatagcaccagcccgggtgagtgaggtttgttcctcctgggtatatacagggtgtatgctgggaaagatgggcaataatgatgaggttttaagggctgcctgctgggctgcagagtttgctgagaagttttccttggttatggcatctgtagccttttgatgtcccttacaatggataaaggtggcctttagtggtagtttagctgcctccagcagtttgtgtatgagtttgccatttactatgggggttccttttgtagttaggaaacctctttcctgccagattaaggcatgagaatgtaggatgtggtatgcatatttggaatcggtgtaaatgttaaccctcttgcctttactagggtgaaggccctggttaagacaactagcgccacctgttgagaggtagtatggagcgggacagtgctggattctaggagtttattttcagcaatgatggcatagccagctgctggacatggctccctaaaacagctaaaaagatcttccattaatgaatcatgtgggtgttccctgcaaaggggcttttgaaatgtgttggaagggggagaagagggagtttaagaggtccaggcaggagtgagagagcttagagtcagaggtgtttacagggaagagggtggctaggttgagagctttacatttctagaaggtgattagagggttacctatgaataaggcatgtatctatgaataaggcatcctgtaagcaggatggtgggagggatagaagagatcaatggctcatgagatcctgtaggttatgggaagatgcagtagtaatgtgttggtagagagtaagtttctgtgcctctgaggcaagtaatgtggctgcacccaagatttttgggcaggatggccagccttggatgatagtccatttgttttaagaggtatgcaatggcttgtggagcattgccatatgtttggcagagtagtccaagagcaaggccttggtcagaatgtacacacagtgaatggggccagcccctccacacctgtgggtatttctcatcaggcaggacgagagactgagaaaagaaataagacacagagacaaaatatagagaaagaaaagtgggcccaggggactggggctcagcatacagaggacctgcaccggcccggtctctgaattccctcagtatttattaattactattttcactatctcagcaagaggaatgcggcaggagaagaaggtgatagtggggagaaggtcagcaagaaaacatgtgagcaaaggaatctgtgtcgcaaataagttcaagggaaggtactatgcctggatgtgcacgtaggccagatttatgcttttctccacccaaacatctcagtggagcaaagagtaacagcagcattgctgccaacatgtctcgcctcccgccacagggcagcttttctcctatctcagaattgaacaaatgtacaatcgggttttataccgagacattcagttcccaggggcaggcaggagacagtggccttcctctatctcaactgcaagaaggcttcctcttttactaatcctcctcagcacagacccttcacgggtgtcagcctggggggcggtcaggtctttcccatcccacgaggccatatctcaggatgtctcagtggggagaaaccttgaacaatacctggctttccagggcagaggtccctgcggctttccgcagtgcattgtgcccctggtttatcaagactggagaatggcaatgacttttaccaagcaacctgcctgtaaacattttgttaacaaggcacatcttgcacagccctagatcccttaaaccttgattccatacaacacatgtttttgtgagctcaaggttggggcaaagttacagataaacagcatttcagggcaaagcaattgttcagggtacaggtcaaaatggagtttcttatgtcttccctttctacacagacacagtaacagtctgatctctctttcttttccctacaatacagagtagaaggcttggtggagttgggcagtcccagtactggggccattaaaaagggcatttttcagctttttaaagtgggagttgatggggcaagctgggttgaggggttttaggatgagcccatgtgaggccatatagaacagcttggccagcaagccaaagttgggaatccacagatggaagcatcccatgcagcctgagaaggagaggaggttatttttcgtgtggggaagaggcatgtcccaaattagctcctttcattgggttggaatggcctgagaattaggggttaggacaagcccaaggtaagtgacctgcatttgggctaacctgagcctttgtgggtaagaccctaaaatttacttggtatgtcccaccccaagataggggtagggcactgagggataaacaggaaagagtgggtgaagggggtgatgaataggttgcataatagaggaccagtctgtttgtgcctagaggggattctatcgactcccacaatagagatagaagaactgaggaggggctcagaatattctggtaaaattgaataactagcctcatatttaatgggaaagacatgggcttagcagacactgacagcattactcttggttccaaggtggtgatggtggtgggagtggtggattctgggccctatcagtcttcaggtagaggtggtgaagtgggataaagcgttttgctgagcacagtctgagatgtgctccctgtcctccagggtgagggaggaagagaggatgacgtaagtgtcatgccaggtaatttataagattgagtgacatacagaaattccttgtggaaggaggtgggatccatggaaaagaagccaagtcttttttcaagctggaagaggtcagctagggagaaggaaacataaactcagattataccttcggcccgcgtgacttcccgcaaggggatgactttggaaggcctttgggtgtatgcctggttttcagaggaagggggttaagtgtgagactgggtatgcggtggagaagaaagggggaacagagggcaacaataagggaktgaaggagccggagctgaaggaggaggaggggatggtggtgggagaaggactgaaggaggggttttgttgtccgggttgaaattagaggaggaaggcttgtctgaaggaaggggcatttttgggtttggaggttccagattagacatctgagagtggtgtctggaggaagttttgaggagccttgccccatactggtggctggaagggtgagaaatatagaggaggggtgtgagtaccctggaggggagtaagtaccatgattcctcttgggaggagggacataagaaagccagggcatccctgcagctcttcacagtcctctggagatcagagtgactggagtggcgagcattctgagggcgtcccctgagaaggcagaccatggtcacctggtgaccagggagacctctcacccagcactgggattttctggtgaaggagcagaagcatgakaggaatctggagaggaggtaaagggagactcacccattaattggagacggcgttggacgtgatgttctgcaatgggggtgatccttgccggagccacccagaaagggggagaaagaaaaaagaggctagagagtttgatcaggatctagaggtcagcccagggccaaaggagagagaataagagaaaaagggctgcaaagagggagtctactcaggatctggaagcaggcctcagtctaatttttgctgcttgctgctttccaggttgcaagagaagacttacccgtttagaacccaatctatgtcctgggtttctgcgccaaaatgtagtggagtttttttcataatcaggagtttgagagggtacaatggaagttgttaggttttgaagggaaggtgagggttaaagaaagagagttggatgctttgcagtaaatgcaggttttatgtctagcccaagacctgcggaggtgggggaccaggttaatgcctgaacccactgccacttacaggctggggtacttacaggtatgggagggaggggtctgggcagtatggcttgctgcccaacaggctattgataagatgttcccatgatgaggtgacttggtccttgttccagcagaatgtgatagggatgttccttggactttttcccagtggaatgtgatcagaaagtcaggtggtcaggccgatgtttctcacacagagaaccacttccacaagattaatttccatactccttccaccacttgtttgaaccttcagctttatcctattaaattcaaaacaatcttttaactctaggcaacaatttatatttccatggcttcttataaccttttagtaaaacacacacacacagacatttttccaaacacaccttgcatgtaaaaatatttttagtagtatcaattacatgttataatgatgactcttagcaatcttacttttaatgtaaaagctggtaagttatgttaattatgtactaggtgctgataaggtcttactattccagcatagctaggggtgtggccaactccacatgtccccaggccttacctagctgtaaagcaggcaagtcaaacaattttcaaaagccaaagaagcagtttatgaccttaaggcacttagcaaacctaatatttgaacataatttagatgacatgtttgtattttgaagacatttgtgaaaactttacagaggagataaacagtgactttcacgtctcatttagccagtttgcacagagagaaagaggtcagagtctgactggtaggaaattcttatccttttgccagtaggccaggtttctgggttttctctccctgagcagccctagtgamcctgctcaactgtatgcaaacaaacacactaccatgaattaagaacatttacaaatagtttacaaattttggagaaattaggcagagagagaaatatgacttaaattctgtttacaaaagtatactcaacatacttaaaatatcaataagcctaaactccaaaaagttagtttaaggttaaaaagctgatgtgttccattaactcctgtgggtctgacaaaggtagcctaggaattccagataaatggaacaaatgatgacttgctagaaatgcacaggaaacaaaataactatccacaaaaccaaataaaagccttctagaagcaaaaataaataaacaggaaagcaaccctaattttttcttactcaatttaccctggaggctaaagtgttgcccagggccccaaaagagccacataataaatattttattcctgatacacaattcaatatccttaagttcaccaatatcatcatacatcctgtgcaatcaagaagttcactttaggcccatgaccaataagcactccagtgccagcactatccatgcaaaacagtaaacatagtgtgaagcagtgcaagcatatctgggaaatttggctccacactaaatccagcttcaagcttaactatataaaaaaaagaattgccaaactgccaatgcatttctttacaatagttattattttactttaatcaagactaagagctttaactacgaaaatgttaactagcccaatgtctccaattctttatcatgttttaaagaatattttattatctaaactttttccacatccttctcccctaatcactggttctttactacattgtttcacaaataattttttcaaatgtgtaatttgaactaacttttagataacttcttaattagacaaaattattctttttctcagtaataacacaaactttttggcacattttgtatacagaactctgtgttaactagaagtattatccttagtaacctaaaattttagtgaaaccctaaaaagaaatactgaactatcagatatgggcatttatagataagaacaattccacaatttttagaaacatatttccccatatcacaacccttccttaattggaaatgacccaaatattcaatgagcatcaaaattaattttaagcttttaatttacacaaaaagtttacctaaaacatttatcccatttactgtactcaattctttcatttttaacagtttatctagattacttctgtaaactgagatattagacactatcacttaaagttagttatttccttgctaaccatgtttctaatagccagtgaatatcaagtgctcacctaaacctgagagtctcagaattaaatatataagtattttgccaataactcagaagacgtagctaacattaaattgctcttatttgtcaaaaaaaaaaggcacattttgttttggctgggtttgtagttttataacattctatgccaaacattgacatctcaaaatatttagcaaacacaaacataaaatccagacaaaatgtatgctgacaattctgaaggcatttctatttttattctaccaataattttaaagccagcttgtttagtaaagttatacttaagtcactttaacttaaaaatcgcttaggcttattaatttatgagcgctcttttacttataagccaatttggcaaacataacatataagtgtacatacaaataaacacatctagacatgtatacacacacacaaatgaagatctaatagcttgaaaccctagccatgagatagcaacacaagcttaccggttttactttgtttgccccagtaggtaatgcaatgaaggctgtgaaccaaaattttgggtaaagcaatttccatggcagtttgattttttttgtttctttttcttttttttttttttctttgagatggagtcttgctctgtagcccaggctagagtgcagtggtgcaatctcggctcactgaaacctctgcttcccaggtcctggttcaagcaattctcctgcctcagcctcctaagtagctgggattacaggcacgtgccaccatgtccagctaatttttgtatttttagtagagatggggtttcaccttgttggccttgttcatgtcttgaactcctgacctcgtgatcygcccgcctcggcctcccaaagtgcagggattacaggcgtgagccaccgtgcccagatggcagtttgattttttttgtttttgtttttgagacagagtctcactctgttgcccaggctggagtgcagtggcgtgatctcagctcccactgcagtctccgcctcccgggtctaagtgattctcctgactcagcctcctgagtagctgggactataggcacgcaccaccacgcctggctaattttttgtatttttagtagagatggagtttagtagagatggggtttcaccacgttggccaggatggtcttgatttcctgacctagtgatccacctgcctcggcctcccaaagtgctgggattacaggcatgagccactgcacctggccctagcagtttgatttttaaaggtgaaacctccccagactccaaagaacactaagaccaaacagtaccaaaggagaacatcactctttcaccaggccctctgcttagaatagcagcaccaaagcctggatatatgcaatggcaatgccatcccagttttccattcaacagtaaactccgcattccaaacaatattggggccaaatagcattgcaactgcgagataaaattctaaggagagtttaatactagacctcagaacctctgccaagggcatcctctttggagaggttgaggtccggaggattcccctctggggcttcccctagtggggcccaatcttaagagtgtcagacgtctctgaccttaggtgggcaccagtcctgcttgcatgttttccctctaaagggaatggcctactatgagctttcattttgtccctggatgaaggccttgacttttagcatccttataatttgataaggccacactttcccatgtttcccattccatgaacttaataactggaggctggatgtgtttcttttgctcttagccagttgactagggaaacggaagaattacgcataagaaaaggtttaagttgcctgaaacaggcgagtttgctctgagctgtgccacacatagggatcagggaccacacccagaaaagatttaaaaaagagtccttctcccttctgggcagggcaattatccccattcactccatggtcttcaggcaatattggggattgatcccagccaatttccctcaatttccaaagagctactaggaaacagctgctaaaagaccaataaagaagaaaaggaaaaaaaaaaagaaaaagacccaggtcccttaggcaaaccaggtggtggcggttaggcttcttcacatgaaaaccccttagtattcaccagccatggccagaaacctgcagtttacctccatgtttacacgctgctcaccaagggtcccgagtgggaaaggaaaagagagagagagatttccctgtatgtaaaaagggaaaggagaaaaataaatcccaaactttgggcttaccttctcctggctggctcaccaaaatatgttaccagtggagggtgtccaggtgcttggcattttgaacaaagaattggacaaaatgcacaaacaaagcaaggaaagaatgaagtaacaaaagcagagatttattgagtacactccacagtgggagcaggcccaagcagccactcaagggccgggatacaggatcttcttgggtccaaatacccgctggaggtttcccattggccacttggtgttcacgccatgtaaataaagtggtggcccccaatcagtctgattgtttgcagacggaaaccaatcagaggctgaagtgaagttacaaagttacactcttaggcaaacgcctggttgccaaaagcaaccaatcagaggtattttctttttctttttctttttttttctttttgagacggagtctttctctgtcacccaggctggcgtgcagtggcccgatctcggctcactgcaagctccacgtcccgggttcacgccattctcctgcctcagcctcccgagtagctgggagtacaggtgcccgccaccacgcccggctatttttttgtatttttagtagagacagggtttcaccatgttggccaggatggtctcgatctcttgacctcgtgatccaccctcctcagcctcccaaagtgctgggattacaggcgtgagccactgcgcctggcccagaggtactttcaattaaccatctgccatgcagaaaaggtgggagtttgcaaagagagtagcctctggtccttttgttacttaggcatggaaagttagggttttcctttcaatgtagttctacgaagtcagcgtgaaatggccttaggtttcctattctcctgcctcactggtatccaagggactctgccattaggctagctgtggagggatggagagagagctgaggcctcaaatgccagtattccttccttccagatttgcgtgtaagaccagataatcttccagaccaaacagtatctgttgatgagtattaggctcgaatgagaaggagagagaagtggagcactggattgaagagaaagcaaaaaaccttcctagatcaacaaggaaatagcctcttctagaatccagatagggccctggactcctgtgggataatgtagtgggtgaaaaaattggtartgaagtcctcggatatggggatgcacttggaagtcttgggaacaaggaagagagacatcctgtggtggtgatttttagatccaacacccaggggcttgggtgcctttggggggattagtagaagagatcgacacattgagggaggttcaggataactgtctgaaaatgagagatttttattgcttatactgatgtcccaatagggtctgtatgtgcttcaaataggtagaaaagaatgaagtccgagcctgaagataacaatatcagtcagaattttaggattgtgaatacctgtccacagaaatagctgggccctgagcctctgctgatgatgtaggaatrgaggcagttaataagctttaaagtcatagggtctcagggctagggtatggtgaggacactttgccacccctaaggttcaaagcctcttggactggaggaggttgttaacagatattctaggcagaaaagctgtgtcaggttgtggtgtatgaagagggagaatttgacaccaaatggtcagctggccatctgctcacctgttcccctgtgctccctactcccacagggtctgcttacagaacaaggcacagcaaggaggcaagacacaagcaagaaatgtgcttgatgttacccactgcagtccttcttccactctggaggattctgaagactcagaagagggacaggcaatggattcagtctaaaccccaggaccaggacactgcctcagcttcgaagcctggatgcaatgctccagggtataaccactgcccagaagcacagctagtacaagctgcagcctcaatccaggcaaggagccaactccaacaggtcaggctccaagggatgaagactgaaaacatgaatgtgttgtgccactaactctagcgtttgcttttccttgtgtttttgcatgcattgtagaccttggcatcagcatttggctagctttaagacagaaactgagaagccttttgtgttttatgcgtcaacttgactgggtcacagcatgcccaaatatttggttaaacacgatttctaggtgcatctgtgaggattttctggacgagactaatatttgaatttgaatcagtggactaagtaaggcagactgccctccccagtgtgggtggccctcatccttctctctgcctgacactcttctagctggaacatttgtcttctcctaccctcggactcagactatgactggaattgatatcattgactctcctagttcttcagactcagattgctctcscgggacttctcagcttccaaatcacatgaaccaattcattataggaaattttttwatatatcctattaattctgtttctctggagaaccctgattaatacagatttattttcctacactccagtaactctccactactccctccctcaacccctggtaactatcctactttctgtctctataaatttgactattctcagtacctcatataagaggaatcatgcagtatttgtccttttgtgactggcttatttcattagcataatgttttcaaggtttattcatgttgtagcatgtatccaaatttaattcctttttgaggctgaatgatactccattgtatgtatataccatattttgttcattcatccattgataaacatgttgttcccacatcttggctattaggaataatgttgctgtgaacatgagtgtacaaatatctgagtccttgccttttttttttttttttggacacagagtctctctctgttgcccagactggagtaaagtggtgtgattctcggctcacggcaacctctgcctcctgggttcaagtgattctcgtgcctcagcctccccagtagctgggattacaggcgtgtgccaccatgcctggctaattttttgtatttttaatagagatgggattcgtcatgttgcctaggctggtctcaaactcctgagctcaggcaatttgcccacctcggcctcctaaggtgctaggattacaggcgtgagccaccatgcctggatcattgcttttcattattttgggtatatacctagaagtgggattgctggatcatatggtcattctgattttttgaggaaccatcatactgttctccacagtgtctgatgacctacagttttgagcttagcctttctaaaatagtggggaaaaaaatgaaaagaaaacaactagaagtggaagtaatttgtccttcattaagccagatatacacatcctgattcaagcttgaaaacaatatcacctccttcgctgatatgtaagtacctttttataatttaaattttaagttatgattaattagaaacttaaaatgtatagtctgtatatgcactggatgtccacaaagtgacccttggttgctaaatctttgagaaaggctgagtagacactgaacgaatgtatatccaacttacttgtcaactcctccaagaacattccttaccccctgacccaagacatgctttctatgagctccaacagtgcccctagtcttcaacagctaccacatctgtgctcgtcacactcttgtccttctcctagtctcaactgtgagccatggatggcagaggccggtttttacccttcaggtctccagttaggcctgtgatggttctagggttttgtttaggctgcgagtctgattggggctaggacaaagggtcaaattcaggatgaaaatcagcctggccaagagcagtggatacatagcccccatcatcccacttctcagatgctcctagaactccagcccgggatcctttatcctctgtatactccaccttctccccatacaagaccctctgcagagagcaggcacaaggagcagataaatgatggtcgatgctgcctgtcaattcagatgggcctggcataacggttaactaatgggtttcttgtttgattgataggttctctcaaaactaaaggagttaaatttctttaatagcaatacatgctcattgttaaaaactcatatcaactgaatttcccttgaacactattaacatttagtgtattatcctttcacatttgtatagatatttagaaaaatggagtgtagtatatacgtttatatatttttgcttagcagtacatcatagacatctatttcattatattcaaatggctcaataatattcccctgtgtagctgtaccataatctagccaaactcctatgtgggggcctggtttgtatttgatttttcagtaayataaacaatgctgagataaacctctatcagctagattatttctattgactgattttaatacatgattggaattttaaccacaagggggaagcaggcaaccatgggaagacaggctaagatttaggataaagaaaaagaggctgggtgcagtggctcatgcctgtaatcccagcgctttgggagggtgaggcaggaggacagctcaagcctaggagtttgaggttacacaaagctataatcacactactgcactccagcctgggtgacagagcaaaaccctctctctcaaaaaaaaaaaaaaaaaaaaaaaacgatttagaaagttatctcacatacataagcttaccccaaccttgtgagcaggtagtagcattagtattagcctcattttttggaggcaaagctgatgatttcattatcaggcgctcttctgtatttccaaataaattgacagcagtacaacattctgcctacattcagttcaagtccaggtgctgtgctggggacactatgaggcatgcagaaataaagaagacaatccctgcccctcagggggtcattatcaggtgtgaggacagacacacctaaataaccaagtgcccactgtaacagacaggagagcccaggaaggtaggaaattcacttcgatagtgaggctgggcacagttttatggaaggggtatgctgacaataagaggtaaggtgtatttagcctttactctgtgcatggcactgtgctaagtgctttacctgcataatctcattaaaacttccccacaggccaggcaccgtggtttatgcctgtaatcccagcactttgggaggccaaaacaagaggattgcttaagcccaggagtttgcaaccagcctgggcaacatagcagggccctgtctcttaaaaacaaaccaaccaaccaacaaacaaaccaacaaacaaatccccatagacctggaaggtatcctacccttttttacagagaagaaaactgatggtcagagaggttaagaaaccagctaccgtggcacaacactggaacgcgcgtccttaatgtgaattcaggaggccctacaagggttggtagactttcaacaggcagggctgggagagagacttctaagagaggaaacacagaaacgaagccttagaggcaagaaatacaggcacgtctgggaatggcaaggggatcagcgtgcctggggtgtgaaaaaggaggaatctgaagagatcaaaactagagaaagaaaactgagtcagagtggtgaagactgtgagtagcaaggcaaggagatcccgctgtattttgtattcaggtgaaaccaactgaagataatgacatcatgtgtgctttatgaggattaatttggtgcattgcmtaagagaacaaggagactagttaggggcttgttaaaatagtcctggccaaagataactagcgaaggaatgagaaccagaagacattacagagataaaatccacaagatcttattagatgctggggaaagaggaaagaattgtgattaagattttcatgtttgggcaaccaggagaatgtgagtgtgtacaccaggagaggggctggacagaagggagaggcgagttcacttttcttttatgagctggaaggaccacagggacctttgagtggagatgtttagaggagagttagaaacaggaagctggtgatttagacatagtacctgagaatcagaagaaacccagggccgggtgtggtgtctcacgcctgtaatcctagcactttgggaggccaagatgggagggctgcttgaggccaggagttcaagaccagcctggtcaacatagtaagaccctctctatatagaataaaataaaatttaaaaaaagaagaaggctgggtgcagtggctcacacctgtaatcccagcactttaggaggccgaggcggtggatcacctgaggtcaggagttcaagaccagcctgatcaacgtggtgaaaccccgtctctactaaaaatacaaaaattagctgggtgtagtggcaggtgtctgtaatcccacctactcaggaggctgaggcaggagaatcacttgaacccaagagacagtgagccaagattgcgccattgcattccaacctgggtgacagaacgagactctgtctcaaaaaaataaaaaataaataaaaagaagaagaaatgaccaagggagctggccagggaaaaacctacacttaagattcagcaaggcatgttagaccctgataacctgcaattccacagccaggtttctatcccagagaaacaaaatcacacgtgcacaagagagcgtatgaaagttcacagcagcattgtctgtcttggtgaaagcctgggtcagggaggagcaggcaaataaaccattaaacatccacattgtgcaatagttaccaattaagtagatcaaaggtattgacatggacagatcttcagaacatacagtggatgagaaaaacaacatgtagtgcaataataatgtataaaacattacttatgaaaaaagaagaaaagccaaacaatcctgtcacatatatattttaaatgatgtatgtgtaggcatagagaaaattctggaaagctaaatccatgctaattgtgataaaggggaggagttgggacaaacatgaagagcagaaggggttaaatggggttttagcatagttgtcaggttttaattttataagaaaaatgtaatcatctgttacttatgtgaataaaaattctcaaaatatttttaaaaagaaagattcaatgggaagaggaagcaatggaatagacaggaatacattcctagactctaggtaggacactgttactgggaacactgggagaagtttctggaakgcaaggtggaaaaaggatccactgcactcagcaacgctgcagagacagcagccagcaggatgagtcctgtgagctcagctggttgtcaacacctttcacttacagccactagctcctgtgtccttgaaaagtcgccatgtcccaccactgcccttgaatgagatggagactttctgttcttttttgagttgtaaacatccaaaagcatttcrtcaatttcttgtatttagacattcccttcctttcccagaaattccacagtgatattctcagtgttctctttccagtccttcaagctgtgtatgaaatctacttcttcccagtccagctccagcaaatacctgcctcctctcttgttctccattcaaaaaacttccaatttgaggtcatttttaagagcattactgtggtggtggcggtggtggagtttatagaatttctcatgggacccacagcatggatgtggctaacactgactgagcacacaaaggtgcaggcactgtgctaacttcataggaagtatctcggttaatcctttcagcaaccccagtaggtcagtactattataacctccaaggtctttctttcacagctgggacttagtgtggctgagcgacctaaggaggtaagtggcagtaagcttgtggtgggtgactctgtgtttgtctcactatgtgagtttgtcctaagtgatcaataggggtggggactggactagaaacaaggtctcaggtatgcaggggtgttcagtttaccaaatgcctttatgaccattaattcatttgatgtcaccacagtgctttaatgacatgggtcattagggaaaataatgagatgagtcaagctttgtaattcccttaaagtggtcaagtctgggttaagggcttttagggcacattaactcactatgtcgtcttgagcaactctgcaaggggtgggagcagagggggccccctttggcccagctctctacaaatcatctagttcctagcagccactcctcctggtctgcaaattcttggcgaggcaccctcctgctctccaaacccacccattccaggcgatcccttaagtggcagaggagccaggttcctggggttaataagcaggctgtttatagccagcagcagtcacgggacagccagctggaaggtcatgccccttctgaatgttgaggtttctcataaacatttccccagtgagccttctgggagatgaggatgactctgggcccattgcccttgctggggcagagcgccaaggccccatactcactttcttctcctttctcccgaatctggctctcttcctctttcctccttcctctcctactctgctgtcattccttccctttcttcagtggaaagaggacacgtttcacagtagacacacaggataactcaaccttctgagcctcagtttcctcctgcgtaaatggggtaataatgggrccttcatctcaggatgtaagggaaagtgcttagcactgtgttaggcacgcacagtggacatttaaaacatattggtcatgtctttccccctccaccctatccttttgccctaatcctggccactgccctgttttctttctattttcctgctccagccctgctcccatttccaccctgggcacttccaccccactgaytgtgctgctgctgcctgggagggtagacgaagaagccaggcttcattcagaggagggctgaccaccgcagggcccgcctggccttggcacttccccatgagaccgcaccctaggcctctctgcttttagtaaatagcccatgggaacagggggtggagggaggatgtagaatgggagaggccaagacattttaacctttggcttctatttgcccttaatctggctcttccaatggcttaatgatcagagatcattgtgtaaattgctgtgtgactttgggcaagtccccttcactctctgagcttcagtgaagtgtgggaaggaagtgaagagcagaagttgggtagaagtgcaggtcctggaaccagaccatctccaccacttgctagcttggagtacataactcctctgtgcctcagtttcctcaactataaaatgcaatttatagtatacctaatttataaaagcacttttaaaagtgcttagaatagcgcctagcccatagttggtactaaattaatctcagctattatatgcaaatggagaggtagaacaggggtatgtgtgcatgagaggagagctggaccttctctgagggtattctaragtcctgaaaacccacattcctcctttttggataagaagaagacagaaccttgaacacaaagtacttctcccaaggagaccataggaaacttgtcaaagacttttaaagccagatggaccccttagaggtcatctggtcyaacttgtcatgctacagtaagaacagggtggaccagagagattcggacttatctgggaccacagagcttttgacgagttatagaattgcaggtggtgcattgcagggaagggaggcactttaagaggacagtgggatgggctgccagagggctggtgggatgctagaggtcagattcccaggctccatgacctccaggattcttagttcaggcacttaccccataactaaagcactgatgtcaccaccggcatctttaataattataaccatgtaatgaggagggactatatcccaagcactgcaccagacgctttcacatgcattacttactccatacaaaatccccttgrcaaatgaggaaacacgccttgcccaagctgcaacaattacaaaggggcagagctgggctttgaatcccggtctctctgatgccaaaaccagggttctcatgcaacactcttttcatgtttcccagagcctagtttgaggcttgagcctcaataaataaggatcttgtatttgtctcactgggctggccaagcagatcttgtatttgtctgactgggctggccaagcgataacactaatgaatmagcctgggtcccagtcacctttccagccctttccaccctgacccacaagccatgatgagagaccagaccctgtgtaggaaatctttcttccaggggccctgcctctgtgttatctgtccccactgtcaatgggagaagcagtggctgctttcggaacaggcaggggaggagggcttagagcctggggtgacrcttctggctgctgggcctgacctccccagactttagccagggccctgacttgaatgggaggagcatgaacaaacagaaagttgtaggagaagcaagaaaccaggtaaggtgaaaaaaacttttcccctccaaaaatacgaagtttatagttgatgtgaatttgtcaacttaatatagtgtaagaagcataaggtttaatacggtcttcctcgccatgatggcaggaagcacatctgttgtattcactaccacatgcttagtgccccacccaaggcctgtctagagtcagtgctcaataaataaacatggaaaatgaatgaaaaaaaaaaatggagggacataaggaagagcactgaaacatcagtcagaaaacctgcattacagtttttagcttcatggctcacagcaacccttggacaagtcacttcggctctgtaaacctcagtttctacaagtgtaaaatagatatcatggcagttcctactgcacagggctttgaaatcacagacttccgtaggagtcatggttccataaccacctaatgtcaagttgaaaattgtatttcttcagagtgaggccggctttagcaatctatgcaaggggtcttgctgaaccagggccagaggaaggccagaggtgtggttctaagaatgaggattaaacatgagagagactataaatctgcttggagaaccgcagcattaggagggtacagcggacctggcaggcatgacagatactctctgccctggagagtctccagccctgcccatgcaaggtgtcagttagtatcagcgggagcacagatgggcttaaatcagaagatgttacagattatctagtccacactggacaatagcccagtgaggggttaaaggctgagagacaaagacccagatattctaattcccagctcaatgctactcttcccacaccaccatcaaaggagggggacggtggtgagagggggtatttgaagagaaacagattggacaaaggaatgaatgcctccatgtagcaacagcttcaaaggggcttcagaataggagatatcttgttaaagaaggaggaacgagagggggaaatggttaaaaataacgtcttacatccatgtggattatgtttccaactatatcatgtgtagttattgcatgtaaggtactatggtggagagttactgatggggcatcagaaagcccatttcattacccagctctgccatgtacaagctctgcgacctcgggcaaatcctctctctgatcctcaaattttcatgtgaagcatgaagcaatagtgcctaccccatagacctatcctggggaccaggttaggaaagggaagtggagggaggttgtatcctctctaaaatgctctgcaaatgggcaacatggcaaagcggtcacaagcaagcgtgtgaggtagaccrtcacttagcctttcttttcttttttttttttaagacagagtttcgctcttgttgcccaggctagagtgcaatggcacgatctcggctcactgcaacctccacctcctaggttcaagtgattttcctgcctcagcctcctgagtagctgggattacaggcgcacgccaccacacccgactaatttttgtatttttagtagagatggggtttcaccatgttggccaggctggtctcgaactcctgacatcaggtgatccgcctgccttggccttccaaagtgctgggattacaggcgtgagccaccacgcccagccccacttagcctttctacgactttgtatcctcatctgtaaaatggatgtggtgggaatcaaatataatgcatttgcagcctttggcacagtccctgacacatacaaagcctgcaacatcctgttagttactaccactagttgggtttaaagaattttctcatgtaatcctcacaataatcctatgaggtaggattattattattctcatattgcagatggggaaaccaagacctaaaaagaattgcttacccaaatcaatagctaattagtagacagcaaagccaactagaacccagatgccctatcagatcaggcaggcaaagatcagaattagtgagtagggcaggcagcagcgggaatgtctgtggagtccagacaataatgcagccacaaagccagagttctggtagctgcagaggcatttccaactttaaactctggtcagtctggagctcagtcagaacaaaccttgtttcatctttgatttaaggagctgagaaaaataagctctggaaagagaagaggggaccctgtgttccagcatcatctgcgttatttattcactaggctgattgcttckcctctctgggcctcagtttccccagctgtatatgaaaggttgaactagattaatgcttctcaaacttgaatgaggttctgagtcacctgatgatcttgtttgaatgtagattctgattctcagtaggtctgggaaaaagcctgagattctgaatgtctgacgagctcccaggccatgccagtgctgcagagctaaggatcactctctgaggagcaaggaactagatcagcttgaaggacatttctggtatgataatgcctatgagagcaatacaccaaagactgagaagtcgagcaaaaacaaattctgcccaaagtgccttacagtatttgggggtccagtgtgagggccaggctatttcccatggaccacagacccctttaaaaaggggcttgatatccagcactcagtgaggcattcagctgcagggccagctctccagactcttcttcccagcccatctcccaccctcacctgcacttcacctcctaaagggaagagacaaaattttctaagccatttccctcccctatcagggctggggagggagcggcttgttcctaatgaagacaaaggacaaggcttaagggacacttgagaatctttttctgtccttccttttcctcattcattcattcattcttcattattcaactatttattgagtactctctacgtgcctggtattctcctaggggctgaggttacagcagagaaaataagacagatgtggcctctgacctcatgttgcttacattctaattgggaggaaaatgggacaggccataaataggtagattttaaaaatgaatgagatcatctaaaatcacaaaaagcaataaaagaataatgaaacaaagtgatggggtagggggcttcttctgtctattgtcctcaagacaaagtccaaggttggaaaagctcatctccacctgcccttgtttgcttctccagcctcatctcctgtcactttttgccttgaactttccattccagccacacaggacatggagtatcaaggctggaagacgccaaccagcctttgatccagtggttctctcagccccaatcactctttctctttgtccctacctcttcctctttttccctctttctcacccaactaacccctcctgctctttcccagcttactcgccactcccactggaagctggccctgctgccactgatctgggctaggaatccgtctgcgccaccttcccwgatgacagcatccatcacctgtgcagccgtgttaattggctgtccttcccccaccagactgtaagtgcctcaagggcaggagtcctgtcttattcactctgaatcctgaatcctcagcagttgctgcaatgcaaagcacagagtaggtgcttaaggaacacctgttgaattaactgacactaagtttagtatatttaagagctcagtaatgggctgggcgcagtggctcacgcctgtaatcccagcactttgggaggccaaggtgggcagatcacctgaggtcaggagttcaagaccagcctggctaacatggtgaaagcccgtctctattaaaaatacaaaaaattagctgggtgtggtggcaggtgcctgtaattccagctactcgggaggctgaggcaggagaaacgcttgaacccaggaggcggaggttgcagtgagctgagatagcaccactgcactccagcctgggcgacaagagcaaaactctgtctcaaaaaaaaaaaaaaaaaaaaaagctcagtaacatgagacaaaggcatctacaagacatggctttggagacaaagaataaattgataaattggaaggaaaagaatataacaattcctcagtcctttctggagtccacattctagtggctttcagctctacactgtatcaggcctcctacaaggcttaccaggcagactgggcagaaattattgacccccattcaacagctggggaaggtcatgcctcagagaggtgaacctacttcagctgaagttacccagccaggtggtggcaaagcatgtccaaagaaagttagggaccagagacgtcagatccaacccctccctcttgcaggggatggggtaggggtggtaatctgcagactctgaactaagtgttctagctcatttcaaactcagaataaccatttgaggtaaacagtagccatagccacaaaaaaagtagacacatgatttgcccatcatccaccttccccctctaacccaattgtccctgggcagaccgtgcagagtaccaccccattcgtcctcaaggactccctgcctggggtcaactcatgagaaactgtccacccgcagattgactgggacagaaaaaaccctagacttttaatttccttatttcacagttggagacaatccaaagcttcgagagaaggaactagtctatatagcacatactgagacagggtcagaactccggagtcagaactttctgaagtatagcccacaagtccccttgacatgaaccttttgagttgggaaagggctaagaatgatgtgaacatgacctggccatttgttagctgtggtcaggctgggcgaagagaggcagcccctctggtagttctactctagaactcattagtcccgccagtcctcaatggtttgtgcattggtaggtagcccatgggaagtaggatgtgggttgcttactgcttagtgactgtttatgaagattgttattgctactacagcagtatagtctcccagctgaacaataacctagaaagtatggagagtggccgggcgcagtggctcacccttgtaatcccagcactttgggaggccgaggcaggcgaatcacgaagtcaggagttcgagaccagcctggccaacatggtgaaaccccgtctctactaaaaatacaaaaaattagctgggcatggtggtggtgcctataatcccagctactcaaagggctgaggcaggagaatcgcttgaacctgggatgcggaggttgcggtgagctgagatcatgccattgcattccagcctgggagacagtgcgagacttcgtcgcaaaaaaaaaaaaaagaaagaaagtatggagagtaggtggagaggggctagcagagacataggtagggcaccttaccactaagaaatagagcaaagggtaggtgctttatgttccagaagcatatagatccaagaggagggaagggacattttggctgaaagcttggaactatatctagcatagataaatgtgattctcataggtgcttgtatttgctatgggaccctggaccaatcattcagtctcttgaagccttagcctctcccataagagggtggaatgagctagtctctagggattcttctttttataactctccctctaagtgggctttgcaggcagagggagtcattaactcctgctatggtctgagtgttccccctcccgcatattccgatattgactttttttttttaagagtctcactctgtcttccaggctggagtgcagtggcacgatctcagctcactgcgacctccaactccctggttcaagcagttctcctgcctcagcctcctgagtagctgggactacaggcgcacaccaccatgcctggctaatttttgtatttttagtagagatggggtttcaccatgttggtcaggctggtctggaactcctgacctcatgatccgcctgcctcggcctactaaagtgctgggaatacaggcgtgagccacactgcgcctggctatattgacatcttaacccccaagtgatgctattaggaggtgggaacttgggaggtgattaggtcataaaggtggatggagcactcatgaatggaataaatgcccttataaaaaaggcccaagaaaggcccctcaccccatctaccatgtgagggtacagtgagaagacagccatgtatgaggaagcaggtcctcacctgatcccaaatccttgatcttggacttcccagcctgagaactgtaagaaataaatctgttatttacatgccacccagtttatagaattttattatagcagcccaaacggattaagacaactccatttcaggtaagcccaacaaacctagtatttgccaggccaggtcctgttgaggcttaattgagaaatgtgtagcaaattgttagtagtacaggcccgagaccatgatccttagaccgctacacttggcctgtggtcagctcttgggaacttctatttcagaaggatttccaccattccccaaactaataagagtagctcattatgcctaaactggacaaacaatgcagtttctgttgactgcctaattttcttctgggagtttagaattctggtatgtgcttagccaaggatgcctatgtgaccagcccctaacaaaancctggcattgagtctccagtgaacttccctggtaaacaacattttacacatgctgttacagttcattgacaaaggaatgaagcacatcctgtgtgcttaattcagctgggggatgattctgggaatctcgtggctgttttcttccagactttgtcccatgcaccttttccctttgctgattttgtaaccttgtgctgtaataaatcatagtgtcagtgtacttatatgctgagttctgtgagtcctcctagcaaatcactgaacctagaggtgatctggggacccccaacaggagttaagcctagatttcacagagtcaatcataatcttgtgccagtcccttaagagtatacagctgaaaccagtgctatccaacagagatataatgtgagtcacatgtaattttacattttctagtggctatattttaaaaaccaaaaagaaacaggcaaaactaattttaagcacatgttttcttcaacccaatatattattattcttttatttttattttcgagacagagtctcactctgtcacccaggctggagtgcagtggtacaatcaccactcactgcagcctcaatctcctgggctccagtgatttgcccagctaattttgaaaatttttgtagagatgtggtctcactatgttgcccaggctggtctcaaactcctgggctcaagccatcctcttacctcagcctcccaaagcgctgggattacaggcgtgagccattatgctcagctaacccactatattaaaaatatatttaaaatatttccatatgcaattttattaaattaagatattttatattcttttatcacactaagtcttcagaaaacactgtgtgttttatactcacagcacagatcagtttgtactagccctactccaagcgtgcaacagccacacacgcccatggcctgcctgctatattggcttagaggttaatggcaagggctctggagacagtatatgcggaggctaaagacactctgtctaggatgctgattcaaccatgttgatttctgattaactccagttccaggaaagccgctaaggttttcagtttatctactcttccttgtgtaagagcatgtccttaacataaatattccccttaggtgaaaacaaacttaatattctcacacttcagttggcctacacatcccttcaatagggaaatcgccccttccctatgctatataagccctgggctgaggaggggtaatagcttggggatccactatctcacttcacagccacctaagacttctgtggcttctgtttctaagtccctaataaatgtttctttctgagaaactgggtatgtcagcttctttcttcagcttctcagcctcctctgactggctggcgcgggggtggggtaggtttacagagatctgctcacagcagaatagtatgtgtgggtcagaatcccggttctgtgacttaccaactgcataaccttaagcaaagttgcttaacctctctatgtattagtttcttcatttacaaaatggggataataatgttggctacctcaagaggttgcagagattaattaatctaaggcagcacctggtatagataggatattgagtgaatgctggctgctactctctttatgctaaagcttggcccatggagatcaacttgtctaacacctcgttccataaatgagaaaactgcagcccagagtttggaaggcactagtttcacaagcaaaaactacagccacccacctctcctcttgatgaactccctgtcttctggctggccctgagatcaaatttgccaattatttaggaaattggcagctccagggccccagctcggttctgcaatttctctcgattgcaaaacaagggctactgtttgaagttggcactgaagtgacgcaggctgggcctcacttctgcttccacctaggctcatcagttagagtggctgatcccatctttgagttcagaacctgaaatgtttactaaccaataataaggctggctttcgttgttttaactttttacaatcctttgagtttattaatttgtgttctatcttccttgaagacacagtgcatcagcactttttgtaaaacctctttttaagtcatcttcggtctctgttcacctaccaagtaggtaagtagtgagctccctatagaggtctctaaaaaataggatgaagaggttccgagtgctcacttgtctggaatgcggaagacgtgttctcagactggaagcaaaactagcttatgattcttctacagcttctccttccatccctcccttcccattttggccaatgcaaatcatctactctcctctgacaagcctactcatcataacccgcacgtcttgaatcttcctagaagatgaaatcagaccagtcttgcgggctctacatggttacaacttgctaacttgaagctctccttattctatatgccaaatattgttttccttgacattaatttatttgatagatatgtatcaagcaactactatgtattaagctctgtgctggtgctggtgyctttttggatcttataatttagtgcagaaaatagacaaacaagaaatgatgataaagtacaacaaagggtcgatgtacaaagtgtcaaatactctaggaactacaggaaaacaagggaaccatcacgaaacccctgtcttaagacgtgacattagtggagatatgaaaaatgagtaggatagtaccagttaaagggagacaacctctgttccaagcacagggaacagcagagatgaaacctggaagtgagggagaatggcagactgcaagaacggaaaaatgtccagtgtagcggaggcagagagaatatggagagtgtggcaaaagaggaagaagcagatggattttgagggcactttctgaagtgctaaggaatttagactttaacctgagggcaatcagaagcagcctggtggagaacgatatatttcaaaacatagggtccttgaaaacaagtcaaccaaatgtatttaaaaggctgctgatgaaaagattgggaagtattgttttcattctcattgttttcactgtcatgctctttgtgccaatggttagacctcctttgaaagctcactgcagcatgaaagcccttcttaatgccagggcaggctccccaagcctccccaccccactgtccatgtcatcagttttgtactcctgttttgtatggctcaggctttccttatactcttaggaatgaaaagccacagacaccaccactgagagactgtcaaagatccttgttaaayaggtggacaactgagatcagagaaggaaagtaattttattactttcygtagcaatccaggggtagcatctcaggtctctggctccttcttgtctcccctaaagaaatagaccaccagggctgggattaaggtgagacaagtgagacatagagggtgcaaaatgtagagagatgcccgctgccaggtgccagcctgcacttrtgtgaccctaggtgccttcccttccctcaccctgctggtatctgctggaaacacctttgagagcagggactttggcttttagacaactctttagcatctctcatggtgttaacatgttgctaggtgcctattttgagggtcactagatgcctactgatactaatgaacaatggatttctgacaaactgatgtgcacacagatgtttatattttagggtaaatacgaaccttaaaagacaacagaacaacatggagagggcctgagactgagtctagagacctggattctggttccctccctgccatcagttggttatgggaacttggataaattgctcctcatctctaggcttcagggaaatgaggtggttgaataaaacgtattgagcacttactgtgtgtcagccattgttcatatgctcccaggctttaactcagctaaagacttcctggcctctgtggttccttccacttcaacaggctgtggtttgaggtgggaagacttcgtagagaatgcaaaacttgagagacatcttccaaattcccagggggatgttaatacctttaatcatagtaaaggtatggtttctcaaggcatttcttggtcagaagaaagttccagaaggcacttaatcctaggactcacactaccaaggctacagccaggccaactgcctcacaataaccttagaacatgtctgaagacagattttcagcttctgcccctagagattctaatgcagtgattccaaagtggggtccaggaatctgtattaaaggcttcccagttgactctggtggtcagagagatttgagactgattccatcacattccccatctgtgaacgggatcatacctagacagcccagccctagaactgcctggtctgatcctaagtgttccatggagattttgtttttttaatgtaatgaatgattaagtcagcaaatactttacatctcttgtgtgctaggccctgtgccaggtggtgattatgggccctattctcaaaggactcctggtctccgtctgtcacttactttagaaacaagtcatctagccagagccagaagggcactggagatcactaatcmatcccatcattacayagctgaggaaactgaggcccagagagtaactgcaacatgttaaagactacacagggagcaaatttwttttctgcttytaagccaggtggtttggccacagataggccaagaagaatacgaacagacaagccttgctgggtttcccactcagtttattactattagaccattccctttttccccactcacatttctgcgcatttccatggtcttcatagaatctaagcctaaaaatagagttttccttgagtctttgggtcttcatttytgaagactctcatgtcacagaaaactttaattaaataaatcgttatgcttttctcttgctaacctttttctacaggcatgtcagctgtgayycttatgatggggaggaaaggcaccccaccttctctgtccctacagtccyaatgccctacccagaatggggttttcaaaatcccaggacacccactctttgtttcttaagcactaaacctatatatagtaaatgtttctggaagtttaacttcagctcttgctgaaattttaaaccctcaatttccagaggaccatcgccaggtgtttttaaaayctcgataggaataagaaatgcttcccagaatggagacttscatcagttctwgggagctattagcccccwtgccctggctgtaatggagaccgctgtgtctgcctcctttcgcactttggagccaaaagagraagggaccgcctcccacgtccacagggacctgacttccacctctctgcccagatttgcttatgtcactgtcgccccgggacggggaggtggggagctgagggcaagtcgcgcccgcccctgaaatcccagccgcctagcgattggctgcaasggtcycggcttggccgcggattggtcacacccgagggcttgaaaggtggctgggagcgccggacacctcagacggacggtggccagggatcaggcagcggctcaggcgaccctgagtgtgcccccaccccgccatggcccggctgctgcaggcgtcctgcctgctttccctsctcctggccggcttcgtctcgcagagccggggacaagagaagtcgaaggtgagtgagcctccgggccgggggccgggagaaaaaacctagcccctcggtgtccagcgctcagtgcaatgcaccccttttcccaggctccccgccagatgggcaatccccaggtgcgagagacctcctgaaccccttttgccgccccctccgccgccgggaccccgcccccgaccgtcgtcgtctcgtagttccatctgttggagagccgagacctggtgcttcaggcgggcagaatgactaagggaggaaggtctctctccccgagctcgcactttctccccrctgccacctcgagrgtcgccttgctacatctatgtcacctccgtgcctgagctgctccccttcagtagggcctaagagggagggcgtcacagaaaaaaatgcccagcgtctgggtgggctgtgcaagttcccagggagagagacaaggagaaaggagagaggcagctgggtggtcctggtcctgaagaactgctgtggggggctcttctaccccaagaatgatacaggcaggtagaaatggccacttggattcagggcattggtagaagaggcagagatctgtgctagaargagctctggagtgacagtgcagaacactcaggaccctgagtccttacctgctcctggacccccgtttctccatctgcaggggagagtttgggggtgggagtgcatggggcacaatgaagctgagggcctcagaggggatgcttggagaagctgaaaaatccacaagctgttctctgaaatttcctcycctggggcagcctcactacccaggacccactgtcctcattagcctgaggaaacctggtagttggagaaagctggggactgctaattcagaagaagaggtagaattctctagagcctcagtctatttccagcaggtgtgtggcccayacctggagtggggatactgaggccaggagtgggatgacccagcatgcttatctcctttgacagtatgtactggggtgggctctgyagacctctcctctacccagggagtgggagtgggtggggaaggaggcagaagccaggtgtagggatagactcaaagcgagcgatttctgtctycaacttcccaacatgcataactcacatttttgcaagctctgagcttttgtttctaaaatcctctgggtcttcactttaattaagttsttatgagtctaggattccgtttccaaaattctgtccacttctcaggaagcccattggaagcacagggttccttccatgttactcaccccttttcggtcctcagcctaaatccgattaatcagcctctccttggagtcagtctaaatggatgtgaagccacttcgtccaagtcccctcctttttatccatccctgttcataatccccaactcagaaggcattttccaggtcaggaatgggatcgattttcaacattgaggtttggggtgggccatagacaggccagcaccrtggagtcagtcccaaccttcagttttggaarggtcaaagaagatacaattgggccctgcctcaagaasgctagtggggagaacgtggactccatgaataactcatcatagctgtgtcttctctgcmgcactctggggaaggataaatggactcagagagaataggatggggatggtytagaaaagttttagggtgaggtgtgatcatatcacatacaaccagtcaggacttgctggctaatgaaagcctgggcatgcccatctctgctcccaagttcttanagttcagatgtcttagctctgggttaggacccaaccactcaccttacccccaaccccagggtaaagagayagggttatggggcatgtggagaatggaatggacgaaaggtgactcagccccagagaggtgttttcctcctaccaattgaaagggagatgctagggaagagaccaggtcctcctcttcttgctgcgtcacctccccagtccaacttcasgctgcccacgctccttgtctctacaaaaggactgcagaagccggaaagagtgacaactgctgacgtgcaygggatcctagtaactgctggtttctaggtgactaaacctggcagagagaatcatggaaccacaggctgacagagttaaagggcccttaagacagccctgaacctgactccatcttacaatggaggagctggagccccagcaaagggggtcacatgscatcagagacacagcaargcycagcactcaggtctcctgactcccagaccacttctcacagcatcatattgataggagtrataagacgggagaggagaaagacacaagaccagcagccccagccagccagagtcctgnctgagtcccatcatccaactctcaagccattggaaccctcttctcttgcccggctgtgggaggattcaggcaccctcatggcctctccccttatctcctctggccactgtttcagatgcggtgctctgggattccacgtgcccagagaagggaagggggctcatagaggactgagttgcagtgatcagtggtgagcacagccgtggctctccacccatgggccaccttctgacccccactatccyttgacatgagatttcgttccaagagactccaggcctgttttgctctgccagcagattcccacaaccrttttgggcagcagcatgcttatctccctggacatatgcccagacagtgtaagtgacttgctcagggccacrcagccagcaaaaaatagaacctaatgaaatagggttctccttgccacacccccaagctgaaactgtgcccagaagctggtccttctstttacaagttcccattattaggacaacctgtaatctttttttcctccatgtctcagagttcatttttggatcatggcagagttaaaaaagtggagaggctatagacatgcctggctttctggccactagatctttgtggcggtctagggtgtatttgttgtgccccagtttgtctgcattttaaggcggaactggccctggctgggaacgaggaggtccaggagcagtaggaatgttgatcttaggtcttgggcctgcctccagcacccaccaaaagtcaccggatgtggaatattagactcatgtaaagcaggaagtttgcaccagagccaagaagagagcttgcagctgccagggaatggcctggcggaggaagcgcagcctcgcccagctcagcagacctgcttcatgacagaggcagctcttctgcactmtactggggccacgccctgccagcatatatcactcccttcacctggtcaggcccaggtaccttgcctcaacagcaagttctccagaattgaggggaagagagggagtgaatttgcttctctaactccagccacctgtctctgccctctcctggtctataatgctactttgcattccatttgtttattgtctgcccacctctcaaaggatatcagggccacaaaggaccttaaagaccaccttatacaatggtttcaaggtttctcctttcycatcacgaccagcccacctgccaaattgtgtcaatgatgcaatgacatcctttcaagaatagtctcagaattttgttgtctgtgtcaygggcagagtaggctcataggccacatcctactagccagcagtgaccccaatcccctctctcccactgatcatgatcctatcaagccatcatggttgacctggttgragagttggttcagttcaaggttctcattttataaatgaggaaactcaggtccgaagaaaagaaagggccagtccaagaccacacagggagttaatggcaragggacatggagcccaggtctcccagcccacagtccactgcactctgtccctccttgtcctggaggctgactgtgagcagcagctggggagggaggaaggcataagggtcatcaccagcctgctcagacccggaacattaacacatgcaggtactgttgcttttccctacckcaccacagccctttcccccatgcctggctctcagtcctgcttycctrtttggtaacaacagcttcatctttcctgtcctgcagattgggagcctctgaatcaccatgtccatackgcctcttcctcctttctgttcagtttttccttcacactggcctagttcaggttctcatcctcaattgcctggattattccaacagccacccaaccagtctccatcagcccgtctaggaacccagtcatcagctttagggcagtctccctgagagcccagtaaatgttctgaaattgacatgtgatgtggaagtaattagcaaaataagtcattctccagggttccatagcactcacttattaagtgcttaatattaataagtgcttattaggtgcttaatattaataagtgctttttaagcacttaatattaagtacccraaaagcacttattaagtgctttcataatcattatcttaaacaaggaattaggagacgtcagtgctagtccagttccaattctcggtgattactttgagaaagtcactctctctgttgggatctttcattcttttgaaaacggagatgtccaagttcctttccagctctaactgctccttttatggcctgtgttccagatggactgccatggtggcataagtggcaccatttacgagtacggagccctcaccattgatggggaggagtacatccccttcaagcagtatgctggcaaatacgtcctctttgtcaacgtggccagctactgaggcctgacgggccagtacattggtaagagcccacccttcctccctgctttatttggggctgtatggcatatttcaatcacaggagcttttctggtgcatgggggaaagggtgatggcaatcacgagagtccaagccccttttctcagctccactgtgttccgtggttttgtgaagatgattatataagccygaggtctgattgcctttggacatgttctaggagattcctagttatccttcttcatctctgggcacctcaacaaccctaaaggcagagggatagagattaggtttgtgcttagagctccctttggctggagcatgagatggtaactgaagctccatcttgctgasaatatctyattttccctcagccccatctgctttggtgcttctcttggcagctctctggaaagcaggcaattgcctcgaggccccagagtgtatgcgtggtgtagcgggatgaaggagcaggctacacttctaatgcccattctaaaataaactttgaagatgatctagtttagccttcccctcttctcaatctacacatgggaaaccaagactcagagcgaagatacaacttaaacagggtcacaaagctattagcggtggaatggggcatttggcgcaggtttcatgatctcctgatatgcttactcctttctccctagctggggtagaatacagaggctaggggaacaggcaaccaaaggcaagcgacagcacccaggggaaaacgctttggggctgagcagtctactggcagggggtcagggaggcaagggcaatttgaccctccatgctctgcctggcaatcacaggcraattcccggaagtgaaaggayggcggtcacgtggcccagtggctgtgagtgctttttctgggatgcttctctctagccttggaacagagcagagtgcgtttgggcaagagatgggctgggtgctgctgcaaaaswgaccaggggacactgaggaaactggggagctgggccagggcctcatctgtgttcctgatttgccaaagattatgggagggttgtaacctcacyccaaagaagttctctgccttgtatccagggatggatagttcttgctccagaaaactcaatcctgagggttctgaatgagtgctctagctggcccaggtggagggccttggcaatgggcaggtgactgacagctgacttgaggaagggtattattcttgtcctccaaacctccaatccatccagattagagtcaagaggataggacctgagtcccagcattgctgtgaactcactggtgatcctgcgcaagtccctccctttctcgggcctcagtagttccagcrgcacagcgggtgagccgggggagtggtgtggatgagacagggctcctcgccaggatactcccacrtctgctctttctctttggcccagaactgaatgcactacaggaagagcttgcaccattcggtctggtcattctgggctttccctgcaaccaatttggaaaacaggaaccaggagagaactcagagatccttcctaccctcaagtgagtactcactcagcatcctgagaaagctcctctcacatggcccacatcttgttatcaaccccaawtcatggtggacatttatcggccaccaagaactactctcctcttctaggatccccagtggaatgagggaagggaagggacaagagagggagaaggacagggacaactggttgtgatgtgcatccgcagggagcaccaaggttgagggacactgaaaagggaccaggctagaaaggaagaccgtggactcacattatgcctatgcccactgcacattcactggctcctgctgcccactgcagaataaatccagactcccaacaccctctcccctgttctgtcccttcctctcatttctgagccctgtgcccacctccttgggacccacctaagaacatttctcaacaggtatgtccgaccaggtggaggcyttgtccctaatttccagctctttgagaaaggggatgtcaatggagagaaagagcagaaattctacactttcctaaaggtaagtgagctgccacctgtgctggctggggctgcagcccctcctggctccagcccacagcgtcagggcccatgccacctcccctgctcctgggctcttggggaatttcttggcacctgactattgttccaactagagggctctgcagaccctgactagggtctcmttggcccattttacagaaaggcccagaaggacccagagtgaacatactaagggtctcacamtcttctagagccacagctggcgctggcagtcttctaactcccaaactggggctcttytctcagggccaggctattccccaggaaggcctgggaaggaagagggtcagggggcctcaagcaaggttgacactcctctyatccctgctctagaactcctgtcctcccacctcggagctcctgggtacatctgaccgcctcttctgggaacccatgaaggttcacgacatccgctggaactttgagaagttcctggtggggccagatggtatacccatcatgcgctggcaccaccggaccacggtcagcaacgtcaagatggacatcctgtcctacatgaggcggcaggcagccctgggggtcaagaggaagtaactgaaggccgtctcatcccatgtccaccatgtaggggagggactttgttcaggaagaaatccgtgtctccaaccacactatctacccatcayagacccctttcctatcactcaaggccccagcctggcacaaatggakgcatacagttctgtgtactgccrggcatgtgggtgtgggtgcatgtgggtgtttacacacatgcctacaggtatgcgtgattgtgtgtgtgtgcatgggtgtacarccayrtgtctryctatgtgtctttctgggaatgtgtaccatctgtgtgcctgcagctgtgtagtgctggacagtgacaaccctttctctccagttctccactccaatgataatagttcacttacacctaaacccaaaggaaaaaccagctctaggtccaattgttctgctctaactgatacctcaaccttggggccagcatctcccactgcctccaaatattagtaactatgactgacgtccccagaagtttctgggtctaccacactccccaaccccccactcctacttcctgaagggccctcccaaggctacatccccaccccacagttctccctgagagagatcaacctccctgagatcarccaaggcagatgtgacagcaagggccacggaccccatggcaggggtggcgtcttcatgagggaggggcccaaagcccttgtgggcggacctcccctgagcctgtctgaggggccagcccttagtgcattcaggmtaaggcccctgggcagggatgccacccctgctccttcggaggacgtgccctcacccctcactggtccactggcttgagactcaccccgtctgcccagtaaaagcctttctgcagcagctgagcctactgtgtgtggtgcttcttcaatggtggccgcccccgcctgggtgggaagtgaggaggagaaggtggggcagggtaaaggsgggaggatgagaaaagaacaaatatgacaacaaaaactttttacagtgggtgcaaaggtaattgcggttttygccatatggcaaaatccaaggctacctccccaccccacaattctccctgagatcagccaaggcagactgcaagggccatgtagccctattaggggtggcatcttcatgagrgaggcccccctgccacaaaaaaggggcaaaaattgcaattactttttcaacaacctgatagttagctgcagtggcgcactccttcagctacttgggagactgatgtgggaggctcccttgagcccgggagtttgaggctatagtgtgccrtgactgagtctgtgaagagccactgcactccagcctgggcaacacagtcagactgtctcttaaaaaaaaaaaaaaaaaaagagagaaattagacaatgctttgagtccctgctttttggctcctaccttggcccactctgcttctctcactcagcatttggagtttataaaaccagttctgatctactctcattccctcccacagttctccaagtcagctgaggttaagatgaggtgttctgtttgacggatgaggaaactgaggctcacagaagggccacgccttgccccaggtctcctgatgagtgaggggcaggactggaatttaaacccaagtcccctgagtcctggcctaggctccttccactgccccggytgccctaccctcagggaggccctgatacgtcaccattactcaagagtaatggtgaccatctcagggaaaggaagaaaaggggaacagaaggagggacccaggaaagcagggggttgacaggggaacatyagcgcataaatgaacatgagtcagaatgttgatcttcttcaacttggatttatgtccatgattcgtgcaaatagctatccagggatggacagccaccctaatctgggcttctggcaccacaggcctccagctatggggtccagggtctgaacctcagggcctggcagcttcaggctggcgcccctcggcrgacgtggctggcatggccttctcccatctgtgatggcttcagcaaggctactgtgagtggtggtggagagggccccagagccagaatatccatcattctcttctgttctggagacaaacccacacttcccacagctcctcacagaggggtaggggtgtgcgtggggcaggtcctgctacagagcttgaagcaaaaattaaacacacacacaaattggtcatggcaactagagggcctgaaaccacttccgggaggttttgaaggaagggggtcttggctgcctcccactcttaggattgctgctcctggaggcttctgcaayggatggtgggtcaaagccggatgaggcctctctccactcagcagcagggaaggagtttttcccagtcactcccagcagagtacaaatgaaagccttctgggtggagcctccccagtcctgtaaacagctcagttcagggactggtrtacaagctggccacccatctcagcctctcatccagctgaggctctggccacaccgtgcaagtggcttctagtttyttggcaatmtgagatcagctggctctgcaagatgaaggtggagccaaatgacacaatctggtctcactgaggcccctcacggtcattttttggagactctaaataaacaaaaattttgaggacttcatgattatgtggtagagcgagtttcaaagtctcttatggaatgcagtgcaggaacagtgaaaataacagctagggttactgggtgctaccaagtgccagggctaagtaccttaagtacgctggtcatgtaatcttcacccagccctatgaagaaggcaggttattatcccattgtaaaagagggaactgggacactaagaggttttaaatgacttgctcatagttccaggtccaggaaatagtggggctaggatttgaacccaatctcaaatcctggagcagttctggggagggagcccctcccattataccaatctctaccactcatcaaagcagcctccaaggggctccactgaacttgtagggttcttcagggaaaaacagaaaatgactgagcagcccaatcccttcttccaatcaccaaatcctccaaactgcaacccctccaaggtgtccgtcccatggcctctactcacacacctgcaaagggacactcgccacctcccagagctggctccatttctgcacaactgtgtcccttagaaagaaagttcctcttcatgttgcgatggacttggcctccctgtcattcccacccactagttataattctgttcccagaagtcccacaggcgaggtggtgccttgtgccccatgagagctctacagggagcaatggcagtcgctaaggtcccaatcttttcacgagtggacacagctccaggctcttcagcctttcatggtggacaccatggtcaggggagcttttcaaacagaaatatggtcatgccactctgctttaaaaatgtccagtgactacacattatgctgaggataagacccaggcctcccaccatgctccgcaggcctgcacggtcaggacccggctacgtcctgaaccctgcgttgcccctctctttccctaccttgttcttggctccagccacgctggtcttccctccgatcctcaaatcagctcccctacttcccctcctcccaccacggcctctgcatttgtcatgttctctgcaaaagcatcctccacccctacctctccacctagctagtgtcactcattctgagagtctcaactcaaatgctgcccccccggtctaggtcggcttcctctgctatctgctcccacagaaaccggctcttcttcctttagggcacttgagtgcagcctgtttgtgtggtgtttgtttattcatttctgcctccctcattagacattacgctgtataagggcaaggactgtatctgcttctgttctctaggcatccatagcacctagcacaatgcctggcattagataatgcactagaatgaatggtttcagcccccctcactctgtggttgccattactctccattcaacactgttttggaaagctgggcctctcctccaccaagagcagaaactaacracatcacccccaaactcaggcaatgctggcagataagatattatctcccccagggaggaccaagactcagtattaggggctcacctggttctgtaggcctggctgtgggagggtccatcacttgggagctctgatttggatttcgaacccctccacagggtagacgccaggtgtattccggctgcgacaaaactggtgcttaataatcaataatcayacccaaaaattacaatagcacctactgtgccaggacaatactaaatctgtattagtcaagtataattgaatctttataacaacccaggctggcactcccatttcacaggtaaggaatctgaggctcagaggggataacttgctgaaggtcatctagcaargagaatggctaagcttggatttgaatccaggtctttgtaaatccagagccaatctcttaagcgccatactatatactctggtgtttaaagatgtgtaccaagaagggtcatatgggagaagctgaaaaagaggccagccaggaggtttctgtaatggtccaggggagagctgggatgcctaaggtggggctgtggcagaggactggggaaaatgggacaagtgacagcagatctttggaagaagaatgataagaagggaaaagaggccaggcgcagtggctcacgcctgtaatcctagcactttgggaggccaaggcgggtggatcacctgaggtcaggagttcaagaccagcctggccaatatggagaaaccccgtctctaccaaaaatacaaaaaattaccgggcgtggtggtgcatgcctgtaatcccagctacttgggaggctaaggcaggagaatagcttgaacctgggaggcagaggttgcaatgagccgagatcgtatcactgcactccagcatgggcaaaaaagagtgaaattccatctcaaaaaaaaaaaaaaaaaaggaaaagaaaataaaaaaagagaggagagaagaagaggaggggaggggagaggagcggaggggaggggaggggagaggaaaggaaaggaaagagagagaaacatggtgaggctctggaacctagttacacgtggaagttataagaaaaagcaaacccaaactctgatacccatggcctggggcctggagggagtcctccttcccaccctgcactcttactcagccttctccgtcctagaccagtgaccctgaacagctgtggggcagccctgcgggactgtggccagatccctgcccctgggtagcagcccagagccaggccctggacacccacctgccaccacrgtgctgtttagttcagaaggatgcagtttctgaacccctcacttaaccttcctctctggaaggtgtctggggcagcctstgtgtgtgccctggagcaagggagggacacagactcaccagatggaagaggcgcgagttggggagtgggggcgggtgctccatggccatggggggaggggggtagcggatctgggaccagtcctcgaagccatggtgtggcaccatggctggcatgggcrggtaggcgtaggggtaggccccgcagagatgttctgggtggggctccacatggtaacgctctcctgaggcctgcaagaaaggctgacgtctggctttggcctgcaacaggctgcamaggacacccatctcatcaccctctaaatagaatgttagctctctgaaggctagcaggctgggtaccaaaggctggtatgtggtcatgaaaggctgctacatgggtacagaaatctggatacatgggcatagaaggctggatatatgagcatggaaggctgcatgggcatggaaggctgggtacacatgcatggaaggttgtgacatgggcacagaaggctggtacatgggcacggaaggctggtacatgggcatggaaggctagtacatgggcacggaaggctggtacatgggcacggaaggctggtacatgggcacagaaggctagtacatgggcatggaaagctggtacatgggcatggaaggctggtacatggacacggaaggctggtacatgggcacggaaagctagtacatgggcacagaaggctgctacatgggcagtgaaggctggtacatgggcacagaaggctaggtacatgggcagtgaaggctggtacatagacacggaaggctggtacatgggcacggaaggctagaacatgggcacagaaggctggtacatgggcacggaaggctgggtacatgggcacggaaggctgggcacatgggcatggaaggctgggcacatgggcacagaaggctcatacatgggcacggaaggctgggtaaatggacacagaaggctgggcacatgggcacggaaggctgatacatggaaacggaaggctgagcacatgggcatggaaggctggtacatggacacggaaggctggtacatgggcatggaaggctgggcatgggcacaaaaggctgggcatgggcacaaaaggctggtacatgggcacggagggctggaacatgggcatagaaagttggatacatgggcacggaaggctcatacacggccaaagaaggctagtcacatgggcacggaaggttgctacctggacacagaatgtcaacagtgatgacagctaatacattgtgggcactgcctctgtaccaatactgctctaaggcttttcctgtattactcatcagttagttagcagaggatgtccccacgcccgagcacacactgtgcatccatcaggctagctccatgaggaaggtaagaggatgtcagtgctgctacctccctcaagcctcctcacctttgctttcctcttctgctgtctgagggcttctcttgccttctcctcatctttgaatgcttttagctgagagaagaagggagggagaaaagactgtcggcacaggtggtttctggccaggcctggatccagggcctaaccagccamraggactgaccggctgatgcttccctctgggccaccatgcgtgggccagccccgggaaagggccctgagggcggagcacagcccaggctgttgctgcaggccacctgcttgtcacagtggtctgtgcacaggtcaagagggttcacgtgaacctcgctgcttctctgctaacatcttttagttccactctgggagagtaaagcccagaactgactgtggaaagtcagaggtagagatatcttagagtaaaactcgtaattgtacaaagaaagagtcagagaggggaagggccttgccgagctcaaatatgattgcagagctggagagaagcagtgagggtcctgacatccagcctcaccagggccctccaatccatgccccctctcccsacgaggacaggccagttgcccttcctgggtccagtcactcttacctgggcatttgacagggtgacctgggcctgcagcttctccacttgcttcttcarctcttccttctcctcattcatgcgctcacgatcactgcgctccctctggaagtcctcctcgaagatcttcacctggtgtggagggagggtgaagagagggagggggatggtcctgagtggggatttctcctcaggcccagaytcccatgcctcctgctggggtcacagatggcagagctgggggtcgccatggggagtgggacagctacacctccagcctccaccttaacttcaaacagagtagttctgtgtccctctatcttacattctgggcttcaagstaggactttatttgaacaaaggatatatggttttaaaaaaacgttgaaagccatcaaccagtgcaatcctttcactccgctgagacccacaggggcagtgatcacagaaccagagtgtggtgtagaccagagtttggatctgctggttctgagggcagagaccctacaaactcygctagggctccagggtgccctggcagaggtgggttgggtggggcctgcctctgtctcttagcctgtagtttcacatccttagtgcagatcagctgagacactggctaggttcaaggcagtttaggaggattaaatagcacagagacaatgggagagccacaaccttttcgctttctttcaccccaatccttctgtgtccctcagggctagtaggtctttaataccattttagtacctgccaatctcctttaaataaaggagaaaagaactccagttcagagtcttcatttggcaagagtatccggctagagtttaataacattgttctgtttttattgtttattgcgtacagttactttctacttgtgacaaataataaatggttttttccaattacagcagtgatataaagctcccttttaaattcatttatttagaatttattttttaaatactaggtaaataatagcacgtgtggggcatagagatggctaaatcataaaggtggtagaggaacgacttaagctagggttatggtgctggaaaggataaacctagagccagtggggggccctggccaatggccagaaagtggattactaattacaggttccatgtgattccaagccgtctgggccctcaggaaagctccagctcccacagagcacctcccacctgatttcctcccggaagcctcacctgctgtttcagcaactcattctgcgtgaccagctcctgtttccttaggagggcccctgctccttctgggctcccaaatgctgttggtggagatgatggcggggtttggatgctcagtgcttcctccagggcctggaatcaggaaaagatgggaccatcagcaggaacccctggaaatcagggccctttggaggggtcatcctcagggaactccttcctaataataatcatactaataatagccaccactaccagtcctatttaataaatgctgccctatttatttgcattctacacatatcatttcattggatcttctgcacagtgccatgaagaaaagactatgatcatcatcctcattttacagatgtgaaaactgaggctcagagacctgaaggggcttgtccaaggtcaaggtcacacagctagtaagtggcagagcacagattcaagcccagcacatgctcctacccagcaggctaaactggggttgtcatgcagaaggggaaacctccccttccctgaacatgtgtggctcaattcttagcacccagacctagaaggaagattaagtcctccgggggaagcttcagtctccccaacaactgccctgccctgagattcttcactttcagcaacccattcccatccaaaccaccccttccatcctcaacacttatgtacatagagaagactggatttaatttctgcttagttaatattttccctttctaacactgaaaatgggctgaaatatcatcaaataacattttgaaaataaaaaaatactcttaatctatcatgttcacaatagattatataaacagtgtgcccacatcttcttaaaggtttcagttaaccgtgtttcccctttaactctgttaacatgttactcagaactctggaacatgtctcaagactgggcaccctggactttggccccaggacagcatcgcccatgggcctccctggaccgaggggagatagagacctggcccaacttggactcgggcttccacctggtctcctcagctcccctagacacgcaaagaaactgcaggaccgagagtaaattcaggatgctccgaggggaagttatggctccactttatcttcctactccaccccacttttaaatgaaaagactgaggtccagcracagggagatgcctaggtcatgagcaaagaaggccacatgccctgcattactcatccacatggtgtctgtccctggctctgccaagaaaacctccaaggtcatctttatgatcagcaacatggacaattctctgcctggatttagagccccaagtcccccagctcaggacagatcgcgtttctttctctggaaacaggtcaagggccccagacttggcataatcagtgtttacaaaacaccaaaaccaaaaagaaagggtttccccagcaggcctaggaatgctcaactcatgccagagtccactgtcaccagggtcaggaggcagagggaaaggaaaaacaattagcacgaaacgaaaagctgagccatgaacttaactcctccaggccctcagagaatgtttcctttcaaagctccctcctgtcagcttgcatctttgaaatgtgctggaaagcaggcagaactagagccgttcccaccngggctcggatggcaaaactgaactggagaggctggagaggctaagctgggactagaccactccgcttggctcagaccagagggtttctggtttcctcagcctctaccctgggggccccatctccctggatcccactgcacaagggcgggcccctcagcccgtgctcctccactcccatcagtgtttgctgaacatgtgcttgatgccaggcgctgtacaaggcgcccagggtatacaccttggtgaaagtatgcacctcccaccaccagatgggaagacagaattaaataagtgatgacgagccatgagaaggagtgtcagagaagttgctggtacctcaggagcatagaccagggcaacctgaatgagattctgggaaggctttgctgagcaagtgagggtaaaacaaaccctgacaagcagggtgggcaggtgaggcacaaggggaagagtgcacctccagagggaagggtgacacaggctaattcaagggctgagtcactcccagtgtgggaggcaatggcagagcaggcgggaaacaggatgccagctcactgactgggggttacccttcctaagctgaatggttrggggtgccagtgatggggtgggcattgcagctggactcaagggagcccagccaagggacccgggccaaggcacccaccttgttgagccgctggatctccttttcctggtactcacgctgtcgggtgagtgggctcagctgatcctgcaggtacttgaccttttggcgcagctccttggcctctgctgtcagctgctccttgtcggtctgcagggaatacaaggttggtaagctggctaggatggcctctccaggaggcctcggattctctgtcctgcctggcccagcccttacgttctcccctggycatcacttcacaatgctcacatgcaaagcacctggggtcggtacagtaatgtccatccggtcctgccctcaattattatgtgtcaatttaaaataataattaaaaaaagaaaaagcagtagctcagttgagtaaaagaccctggattccgacaccagttcatccactaagcagctgagacccctggcactgccacagccctctcttgtctaagcttacctacctgtcacaggtacggggttcctaacgtgagtcacacagagacctcaggaggcctgtgagccccaaaactgaatgcgaaattttgttgtgtgtaatctgctagaaagaaaagccatagttctgaccagattcacatgggggtcttccgtgatccacagaaagcgataaactacggataatccctaacagacactgcagctcatacagccttggagcctagaggagagatgacacgcccagagagaactgtgacataaggcagagagtgctcctccagaaagaaacaaaatactgtggggctaaaagaaagatcaccacagctgagggaaggcttccaggaggcggttccataccctctacggaaccagcagggcttcgccacagccagccaagactgggatggcctttagacagcatcaagccccagccctgtaatacgatgggaaacaaatgtccagagaggggaagtgacgtacccaaggccacacagtgagctggggctagaacccaggtttcctattcccttgctctctctccttccatgtcaaaggaggtgttgaaactaggggatggcagcacagtgcagtggaaagaccaggcacatccccaaataaactatatattcctatgtgtacatatatgcgagaaaggtctggaaacagatgcaccaaaatggtaacagtggttccctctagggagggcctgggatcatggcagtgggaggtagtccagggaaactttcactttgtagcatgtggacatttcataactgtgtattcacagcatgtgattaagagaccagtcgcaggggttagttttcacccagccctgtgtgacctttagtcagtacggactgcagagggcaggcttggtcagacctccctgggaattgttctggactccccatcaagaggctcccggatgggcatgggctttaccgaaattcatccttatctacagggccacgccttgtcatgaaacgtcctaccttccctgtagctgacagggaagagccctcacattccagggatttgtctcacctaccactgtgagcaagggagaggggccaaagagccaggatgtctggctgcgagtcaccaggtatgactgtgcactcataaggaaagacagaagtgttctccctaccacacctccaaggtaagggggtgtcacagacgtaggctgactgctcaaataaggcccctggtgtcccatgctgacgggaggaactstgaaaggcaatccaggttgaaaatgtccatttttaagctaggcaaaagaccatgcccagttcccatgaaggggaaaacatggtgacataaataaaatctcccaagagtctggcagtcaagtggcctttcctctttaagctgctccaaggtcctgatgggccttggctggtctcattcatacatatgactgggcagatactactacttcaggggacctgttgtttccccccaagaaagaatctggtctcacttatgcccactctctgatctctgtaacttcttcttcgtagtactttttttttttttttttgagacagggtctcattctgttgcccaagctggagtgtagtgacacaatctcagctcactgcaacctccgcctcccgggttcaagcgattctcgtgcctcagtctaccgagtagctgggactacagacatgcgccaccactcccagttaatatttgtatttttattagagacggggtttcaccatgttggccaggctggtctcaagctcctgatctcaagtgatccgcccaccttggcctcccaaaatgctgtgtttacaggcatgagccaccatgcctggccatacatttttcttttagagaaacagggtttcactctgttgtccagtctggagtgcagtggcacaatcacagctcactgaagcttccaactcctgggctcaagcaatcctcccacattagcctgagtagctaggtctacaggtgcacactgccacacccagtgaattttttaatttttgtagagacaaggtgtggctatgtcactgaggttggtctcaaactcctggcctcaagcaatcctcccacctcggcatcccaaagtgccaggatcataggcacaagccacccaacccggccttctctgcaacacttaacacacttttactttatttgcttctgtaattagttgtctggcacctctttcccagcgagggcagggttgagctgttcctgtggactctatgccaaagcacaatgcctgagacaggctctgaagacaaatgccgggatgaatggataaatgaagctctgtctcatgttgtagcccctccccaacaaatcaccatcactatgctgaacacttggcagcatcccaccccaccaagtgccatacagcaggcctgcttggatcttttttttttttttttttagcaagagtttcactcttgttccccaggctggagtgcgatggtgcaatcttgactcactgcaacctccgcctcccaggttcaagcaattctcctgcctcagctacctgagtagctggaattacaggtgcctgctgccacacctggctaagttttgtatttttagtagagatgggatttcatcatgttggccacgctgatcttgaactcctgacctcaggtaatccacccgtctcggcctccccagttgctaggattgtgagccatcgtgcccggccacctgcttagatcttttatatggtgtgcttccctgtacagttccccattccctacaattttaatggaacaaaaagttctgaataaaaacaagaaaatgtgaaaagctgtagttaatgtaactttctcaattttcagatgggaaactgcagtgcagggaaggaacgtgcctgtgtttttggtcacctagctctttcgcactagacccccgggtctcctgactcctgcccctggcttgtttgctccacagaactctccgctaatgtggaggggaactgactctgcagggaccagcagtcacacttgcctcctccatttcaatcttggacttggccaggaggagcttgcggtcaaagtcacgctgcttctgctcccgctcggcctccaggtcagtcacctgcttctgcaaatcagccagcttctgacgcagctcagtgatctgggttcagaggcagagaggagtgtgtgaggcaaggatgtagagcacttgcaggatgtgggcagggcctggctgcccctgggccctccaacactgcccccaacttctcctctgggccatactggggctcagcgkgkccactcyccaaggttcaaagctgctaaagaggcagmgagatgaagaccaggcatgccctgtgggcgtggcsaggaaccccacattaccttctgctcatactgctgcttcatggaccggaaatgctggtcccactgcttgttcacttccagcagctgtggggagagactggagttagcaggagatgagcagagaaggaacaaggagagccatctcctgccccatgtacaccagcgtcccaaggtgtgctcggtgtgtgtgaatagtggctacagacactgtctccatccctcagctctcgaaaactcaatgttgctcaaagccatccaccttcatccactgctgcattttaccttgccaggaaagcaagattaacactaagacatggaaactacatmgttttggtgaataattatggaacacacacacctctttggagggcagtctgggattatgtattgaaatttcacattttcatcaactttaacccaataattccactctgaagaatttaaccaatagaaacacttacacaagtgtgcaaatatatatacacaaggctaatcatctcagcaatacctgtattacaaaaaaatccagaggccaatctaagcacagaagataggttaaagaaacgatagtataaacagacaatgtgcagctgttaagaaaataagaaaataggccgccaggcacagtggctcatgcctataattccagcactctgggaggccaaggtgggccaattgcttgagttcaggagtttgagaccagcctggagaatatggcaaaaccccatctctacaaaaaatacaaaatttagccgggcatggtggcacgcatctatagtctcaactactcaggaggctgagatgggaggatcacctgaacttaggaggtggaggctgcagtaagccgagatcatggcactgcactctagcctgggcaaccaaagtgagaccctatcttaaaaaaaaaaaagaaaagaaaaaaagaaaacagaaaataaagcacctaacacacttcctcagtttgaagatgacactatccaccatactcttgatataacaattcctcagggaagaaaaacaaccctacatcatcaactaaataaaacaaaaggagtattggccctgccccttaagatatgtcataaggatccacaccaatttcaaaaacattgcatatgataaaaaaaattacaaagaattaaaggaatatagcatatgttatagatatgaatagatactctcaaaggcagttaattttttttttggaggcaggcctaggctggagtgcagtggtatgatcatggctcactgcagcctcctgagctcaagtgatcctcccacctcagctcccccaagtagccgagactacaggtgtgtactaccacacccagctaatttattttttgtagagacagggtcttgctatgttgcccaggctggtctcaaactcctggttgcaagtaatcttcctgcatcagcctcccaaagtgctgggattacaggtgtgagccaccacgcctgacccagttaattttttaaaaaagaaaagaaaaaataatctgtaaagcagtgtgtgtatatacatatatatacacacacgtatatgtataattttattctactttgaaaaaaactgagggatattcaacaaactgtaatcagttgtggttttctctaggaggtggtattcttgatctttttgtaatgagcattatatcacttttgaaatcagaaaaaaagacgcttataacaatacaaaaagaaatctaaaactaatatgcacatcaagaagctttcaaatgtgcgggaggacaaggggaggcaggctcagggttctagagaagcacctgggctgtgtggagaggggctagacggaacagacagaacaagtgtctaccaaaaaggagctgcacttcgacctcgggtctggaaagactggactagactgggggtgtgaggagggggaggaacacatgtgagatccatgggaagaggcggaatggactgcagcacagggactctgctgcgtggcttctctcttggcagcagagggaaactaagagcctcttacgaactggctcctgcaccttagtgggactgggggacatttaaactacctaaagacctggccatcgccttaatggagtttaggaatccactcagtattctgtggcaggcttcggctgctggctggtccttttcattcttgcctaagaaaattcttgaaatgggagtctcaaaatatctgcaaagtagctacaccaatagaggtaggtagctatttttttttttgagatggggtcttgctctgttgcccaggctggcacgcggtggcacggtctcggatcactgcaacctcagcctcccgggttcaagtaattctccctgcctcagtctgagtgggtgggattacaggcatgtgccaccatgcccgctaattttttgtatttttagtaggcacagggtttcgccatgttggccaggttggtcccgaacctctgacctcaggtgatccacccgcctcagcctcccaaagtgctgggattacaggcatgagccaccgcacccagccaaggtagcttttaacgttaaaaattttgacagtaaatttatggagcctccaggctagtgggaagcggccttaatcccttccttccatgatgggtcctccctaaagcatctctcaagggtccctccactcctcatcggtgatgctaaaacttgcctaacttatcacaacctctttccaccatccaaggtctaccataggagcctgcctaaactgtagccccaacaattttaggccatgccccacatgccacctcctcagagtgaccactgtaggcaaagggactgatcaagagaggacagtccagggcaaggagtcagacctcatccatgggcaggcaggtcagtggtcaccatgccaactcctcatggtgacctgggacctgccagagccaggaggccagggcaagcctttgtgctgctggtcccgggaggtaagagggatcctcccactactgccacctcggccacctacctcactgcgctgctgctccagcatcttcaccttcttctcggctgcrcccaaggccaccacctctgggaccttacctgcygtcacactagcctggggagaagcacagaggagccttcaccaaaacctcaatacaaattatctcacccagtctcggtgctcctctaagacccctcacccaagkggccccagccctctgtctccctattcctcccacccagcaggacaccactaaccatcccagtcatgactacgtccccttctagaagtctacaagatgatgattccccctccctgactcagggtggctgccaggccctctccccttcccttctcccctccctacggtcattctccctgtttaggtacaacctctaaggtactaccagccactctcctcactccctacacacatcagccaaaaaactctctggcctggaaggtaagacatttgagatgtagatacagacagatatagatatagatatactcattctataaaacatatatgttttataaaacttttacaaaagttgaagttatataaaatgtttatttaaaaacatttttagaaagatgcagaaataaagatctgtgtaatacacatagatgtttcccagctctgtcctctgtaaggggctaaagcagagacatccagcagcactgagcaaacctagtgctcagttggtttctaaataccattttctttttattaaaaagaaacagggctgctttgaggggctggagcagataaaatataaggtgagtttgatgcatcttatagtgatggaaagtaaggaagtgctcaaatgaataatactaataacaataataataaaagagcatgtcaaaagggcacaagagacaacctgaaaaaaacatctatggccaaaacgggaacactttgaacagcaaaatacatcacaatagtattggattataagtcacagtatgaaataaatactcttgagttcatactgatagaacaaaatagctgaatcaataaataaatgggggagaagggacagctcttccttacaaaagaattctgattaataagtgtaggaagaatgaggaaaatatgaaatcaccattccattactacagtaataactrctgcaggtggagatccaccaatggtcactaaaatcagtgagtgaaagtttaagaaaaaatagagtatttgcatagtctctaagtttctcctcaaaaataaacacttattaattacaaagggaaaattggtcacttgattgcagaaacttgaaagacagcacttggccaagtgatgaaggttaacagtagtaaaacactgacatcatgtacccctggtctgctggactgagaaatattctgcacactctgatgtacacagaacgtcacctccgtgagattcttgccaaaacacgtaacctcaatctcctcatgagatccaatcacttgtgaggcctcaatcgtgacagcaaataagtctatactgaaaaacattctacaaataactggccagtacaactcaaaagtttcaaggtcatgaaaagcaaggaacagctaggaactgtcacagactagaggaaaatgagggagaagagacaactgaatgcaatgtgggatcccagactccatgctggcacacgacaggacatgagtgcaaatctggtgaaatctgaataaagtctgtagtttactaagtagtacatgccattaattcctagttttgatcatttaacctgggttctataagatgttgccgttasgggaagtaaaggaaggggataggggaactctctagactatttttgcaactcttctgtaagtctagttataccaaaataaaaaggtttaaaggttaaaaaaaaaaatagcaagtgctggggtgaaacagcagacaaggccagtagtccggagggtgtgtgtcgactctatctccaagcccctctgtgatggacaccaagaccctcgtcttctctgggcttcaatgcgatgagaagctcaaacagaagaaggtctgcaggccccatccggacttctgacattgtctgccatcatcctggagtcagattctctctattctcagcgttctctttccagcgttctctttccctccacactgcacccccaagtggcttcaggtagggctgggtgcagagcttgccccctacaggctcaggcctgtaagcacaccatagcaccaaggagcaaggtgagggggagccctccaaggaaggtcaccccctttgagaaaggggacagacaggcctgcccacttgaaatctgcggcatcttggatgggagctgtgcttagcaaaaaggtcaacaagttaccggggaaggaggaagagggtggattccaggctctagggtggtgcaccctgaacctccgcgagggagagaggagtccacgtggagtcagcagagctggctgctggccccaaatctcccctaaagagcaacagctaacgttcactgtttacgacgctaaacctactttacaagcattgcatcactgaatcctcacaaccaccccttgaggcaggtgttactatcttcattttacagaggaaactgaggcctaggagtcttatgtgacttacccaaggttgcagtgctggtaaaaggtggagctagtattccacctgcatgcaattccaaggcacactcgtcgcccctctgtaacacatgcctctaatgagacaggtgaccctggggcacaagggcaagtcgctcccactctcaggaagggcaggaagagcatctggctcggggcattcaaggaagaygagtggagattaaagggcacaggaaaagtaaagagacctgtccagggaattccacacctgaggcagctcagagaacccaagggagaacagccgagtctacaagtcccttccacaagagggcagacaaggccggatctgatttggggaataaagggaagaaaagaggatctccatgggctgggattcggaacaccagggaagagcagactttcaccatttatcagcatgtttccctggccgtaccctacatctgcctgatagcaggtcacacagaaatcctgattatatgatgttacttgacctctccaaacctatggccatagctatagaatggaatactagtcccagccttgcctactctataggtagagatgaggcccaaataagawaatagatttgcatgtcctgggtaaactctacattgtcacacagtaataaggaattaagccattacggtaattgctactattgcataggtgtagggtgggttaaagacattgagccctactgttcagctattaaaccccattaaagggtgaagtaaaaacacgttggtaaagagttgggactcagctctgcagcaaggggaatggtaacgactgggcaaggggtgcagagtctgctcctgcttgggacctggatgtggccagtgctgggactagaggataggggagtrggccagccctgcagcatcaccagaccacacagacactagccaacaccctcccctctccactttagaggctccagagacacaatcccaggagcttagcagaatccaagggagcttgctcaaccaacctaattctgccaggaatatcaaagatgttaaactgacttttgggaaccactctctaagacagaccttgacaaactggaatgtntttacggaatgcacccagactgagcaaacgactcaacaccaccttctatgagcaatggctgaaggaactggagctatttagccaggagaagagaaggcttatgaggcccatgaagccacagtgactaccagcagcctctaagcatggaggtcaggccaagyaaagaaaaaaacacgtaacagctagaaccttctaccactggcactggctgcaggagggaggaggctcactgtcactggaggtggtaagcagaggctgagtacctgcaaccaaggatgctacagaaggaatttctgaccacatacctgctgctgtcyagccactgccttcttgcctgtcccttccatcttcggtgagcctggccgcccagacrcaccctctttgttgccattgctcatcaacaacttcttgagctccaaattttcctccctgggatggaggtaaacagagaaatcacaatgctgaccctgagttaagaaacctmcagggctccttaatgctcactatcgcatgagttgcagctgagccccagggagtactgcaggatcctgaaacctgccctcctggaaaaccaaaaagggcatcttcagctaccttgctctcaatctgtggaggtctctgattgtcaatggcagggtttccccagctgtggaatttctatgcacacaagaccttccggatatatccaaacactgcattaaataaccctggatcacattctagtgagaaagtgacaccctttccaattatcttcacatttcttgtgtagaccacggagacggtgcgagcttggtgctaacaggccctgggcacctctctagttactcgccagtttccctcgttaacacagaaggtgcaggctgcaggcccagagccttcaatgtgcaatgatccttagcctgaatttattaacatcctttcactttcattgtatttagagttatcttctatttatcacaggtaatgctgttttccatttactctagttaaagttgcctttataattttaagtaaaaagatgaatcaaattaaagtaaaattctaagtaactaataaggcaggtgatagaggagatcataaaattagtgatgtggattcaggtctgactaaaatgtttcttctttcttttttttgagatagggtctcgttctgtcacccaggctggagtacagtggcccaatctcggctcaccacagcctcgactgctcctactcaagtaatcctcccacctcagccacccccaacctcccccaccacacacccccaccctcttgagtagctgggactacaggcacaccaccacacccagctaatttttttggtattttttgttggggctggrggaggggtggtgatgtatttcaccaggctggtctcaaactcatggactcaaagcaatcctcccgccttaacgtcccaaagtgctgggattacaggtgtgagccacaacgcccaaccaccacttctttatgttctatttgccagctgagtttccgcttgaaaaaccaataagtaaaatgactttcccaaggtcatacagcagagacttgcattcttgccttctaatccgtgacttttttccccagcttcagtttctgaatccatggatggggtcaytagggctataaaaaccccaaaagtgcatccttggccatccaaaagcaaataaattacacactgattcaaaatagccagtggctcagtagttaaacattacttctgtggccatacttacaaagtttatattccttctctttctgttgattctaataagaaacaggagaggagggaaaaacagagtggcaagtcctgtctgtgacacgggcctttcctatgtgcctgagcccagctggtacccaccagatgactcatcacycaaactgtccaggaccacagtgcaggcaggaattgtggccactcacaggatggagagcaaggaggcccaagttcytgttgtaagactccaatcaagtccctgcctctccctgggcctcagtttcccctctgcacagtgagaggtctgtctgcatgatctccaagggcttgtcaagctctgacagtcaagatcagtgtttcccaaggcgtgatcctgtgcctacctcgttcataatcacagagactcctggtgaaatgcaggctcctaggtcttgcctaagacctgtcaattcagaatcttgcaaaggaaggaagggaaggcgtataaacttgtaatgcctttccctgaccctcaaccctcagttaagtctaagccccctagtccagtgggggagctctcatgttctcaggaagacagagcaggttgggatggtgaccagcaggaggcagcaaagtcctgagtcctctggacagccagttcaccgttaacaggggagagaggcaagtgctggaggaggaaggaagtacaatctatgctgaccttcttctgaagctctcaaggcactctatacacctcccaaggtggcaaaagggccagagagaaaataccaaaagagccaaggagaaggatcaagagacgtaacctccaaatagggctctgggcacagggcctcagagccacggtcctcaacccagaaatcagtgctgcacaccagcycctcctcctgcagccccmactcctcaccccttctctgaggggcctgaacttaccgcagcctctcggcagcctgatccygctgttccaggcccttatccaacttggccttcagagcctcgttctccttccgaagctgctcacacagggtctgtggggcaggggaacagacagggtgagggaaaggaggggcccctcccaggtgcaggctgagctagaggatggtggggggcctgtagccaccccagggcccaactccttatcccctttgcctggcctcaccccatccctctctaaggagctaagccacttggccacccacgtgtcctctcccttgggagccaactacggagaagcctgaccaagtatcagccatggggccttctgctcctccaagacagacagctccatcccttctccttcatccctgctcccactgccgggacccctattccccaccagcctcccccagctgacttctacycttctttgaagtcttagtttaaatcccatctcctcagagaagtcctccctgactccccgatccagctacattaggctaactccgttatccttgctcacagccccccgcttttacgcttctcagcacctgtggcagataaagctaaagaactgttcgtgctgctgttttcttaatatctacccccttacccctaattaattcctgagctcccggagggctgggacccctaaccatyctcttgttcactgccagatccccagcccccagctcaaagtttgtggaaggaacaacatgactgaacagccaaatgagcaaatggacaaatgagcaggcgagtcctaggggggctgaaaggcacaccaatttgcaggtgtgagaggtgcccagtgttgccaaggggaaaaccagaagacaaggcattcagtcgggacctcactatgccctcacgccctcacaatgtggctgtgacacttggttcctcctctacaaaagaaagacaactgtttctcttttttttttttttttttttttttttaagacagagtctcactctgttgcccaggctggactgcagtagcatgatctcagctcactgcaacctccacctcccaggttcaagagattctcctgcctcagcctcctgagtagctggaactacaggtgtgtgccaccatgcctggctaatttttgtattttcagtacagacggggtttcaccatgttggccaggctggtatcaaactcctgacctcaagtgatccacctgcctcagtctcccaaagtgctgggattacaggcatgagccaccacacctagcccagggacaactgtttcttctctgcctcctctatagggctgctgagagggacagatgagacagtgagagtggaagtgtccatgaaccatcagtcacttgcttatgtgcggggactcatattggaagctctgtgaactgggggcatggaagaggggtcgccagactcaggacctcacaggctggggggaagggaaggtgctgactagcaatgctagcatacagtgtcagcacagagttgttcaatctttccacagatcctcactgagcacctcacctgtgccaggtacattgctcggtgtttctccatatactgcctcactggtgcctcacaacttcctcaaagctaagtaactcatctctatgttaaaggtagggaaaccaggtaaaatgatacagtctaacaggtgcacagctgctaagactcatcactggcggggagtaaaactccaattggcagaccccacactggtgtctctttcccctgtgatgaaagatcagagaagggagagagatggtgcccaaaggaggggacagcctttgagctgggccaggaccagggccattcactaaacagccatctgctgccttccacctcccaggcctgttgcaggtggatgcaaccatgtgactagttctggccaacaaaagaggtgtagaagggacaagcatcactcctggactggcctacgcacaattctccagtctctttttcctggtagcaggggctgatgtggatgcctcgtattctaaagggcaccggaaagttgggcccctgtctccctgggactctaaggaactgtgtagagcagaaacaaacccctgccacacagaataggagggaaaacttttgttgtgtaacccagggagatttcagagttgtttcatttctgactcacaaaggagactcttgggaaggctgaatggaggacacagccttcaactggaggtggctggacaatgagggagatgaggcttagcaaacagagaaccagctgggcatggtggctcacaccagtaatcccagcactttgggaggctgaggcaggaggatcacttgagcccaggagttcaacaccagtctgggcaacatggcaaaaccctgtctctactaaaaataccaaaaaattggccaggcataagggcgcatgcatgtagtctcagctattcagggaactgaggtgggagaactgagcccaggaggtcaaggctgtagtgagctgtggtcgcaccactgcactccagcctgggtggcggagcaagaccctgtcccccaacaccccttaaaaaaaagaaatcaaaaaattattgttatgagtccattcaatgcctagcagagagccttatgctatacctgaccttgaatatgtttgtttagtgaaccaagaaacacatcagtgaatgaatgaggaggaactggatcaatacacctccacccaggcagtaaaaatacccaagatgccatgtctctgggcgaggcctccagggaacagaatggcctgctcctagtccctaagggaaggccaggacaaggcctcacttgctgtcctacccttgcagtctagagagctgtttccttggagtctctgggccaatgccctgggtgcaaaccggccaatggatagaatcatcagaggtcacaaagatcatcaccttccatccaaggtgctacgagagctatgagttcatttgatcatttattattttgtcctttcattcattcaccaagtgtgtatgaagtgccacgaactgggaygcaacagtgaatacaacagacatggtgcctgcccccctcaagcttaccttctagcagagagtataagaaaaaaaagagtataagaaaaaatgtattaaataaaattattacaaactatgataagagctaagaaggaaataaacaaggaggggactgaaataaaaaataacakaggttggcaggaccccttttaaggggcctaggatctatccccatctcaaagctgaaaagtggatgcgcaaagtgctctcaccccaggcaccttcctaccctgcccacagcctaggcactgtgccaggctcaccttgccagggttcagcctggataccttgaagcctcactgacatcttaaaggggttcccttctctcagcctggctctccaggcctctgcctctcgttcagcctcacctcccaacacacccctcccctccaggtgggatgggcatcctccgtgctcctctacccccacacctctcctcatactgcatctccaacctgattgcccttcatgccctcggcaaccaaggtcacgcaagggggactcccccttctgccatcagcggggcacttgagtgcctgctgacatgaatgagaccacagatcagagaatggcctgggaggagagtctgcagggagtaaggaggcttcaagtcatggctctgtcactaaggtggcgggcactcagatcacgagcagtccctcagaagcctccgttttgccatctttagaatggtcaccaattataactgaacacttscccgctgctaaagcccacaaggctaagaccccctgcccagtgtggatgcccgtcatgaactccgaatggggacctctcttccagcatggactaggttctggactgcactgggtgcttcatgtacatggcctcatttaatgcagcaatctaaccatggaggcacttctagctcatgttactgataggaacattgggggatagagaggataagtgacttgtccaaggtcatacagcaataaagggtcactactggaaccaaggaccatataactccaaggtctggcctggcctagcaaggaaatctgtccattccccacagcacagggaggctttcaaaaggaattcaataggggaggcaggttgggatggtggtcaagagtatgggctttggaatgcgagagatcgaggttccaatccctacttcaccatttaccagctgggtgaccttgggcaaaaaaagggctgcttccccacctgtgaagtggtgataatgagggtgcctaccctggggggaaagaggcattatgaaaggagttgacctttgttccctcccttcccatcccccaaccctgcacatgagaaataaaggcagggctgctgggggtatccccaaccatgacactcgcattgcccatcccgtatttccccatttccttcctcttcctcatccctccccacancttccttatcctgttcatcaccctgaacaaaaagcccgaagtctgcccacaacacagscttcagaagtccccatggtaccagtggattcccaggagcaggaaggtgggaagagctcggggggaagcacgcctgcctgtctcgggctgccctccccacgcgcctcacctgcagaatggaggtgcgctgctcattcttgtgcaccttggatgccagtcggttgaactccagggccatgcggcccaggtgggtgaagagctggccgtggtccggctcctcggcacacacactcagcgtggtctccaggcgctgcaggtgcagcatcaggttgccgtcctcacgggscagggggcccagcrcctggagagggaaagggcacacggcccactcttcaccaaggcctgagtaggcgccgccagtccattctccctctgcttcctcatttctcatgactcagtttccccctgtgaccccagctcagccccgggaaattctccagttatgcaggttccctgtctggggctgactcacagggcagaacccaggactcacaggccactggtggctccacagcagcggggccaccatcctcccacacactgggccttgcagagtgcctgacagtaagtcacttgtctgctggacctcagcatcctcatctaccaaatgtccgcacaacccttccctcccttcaacctcacagggttcttaggaggatgaattgacccctgacagtaacaagcccagaaaagggacatcactgcacagtcagccctccatatccatgggttccgcatccatggattcaaccaactgcagatcaaaaatcttctaaaaaaacaaactggccgggcgcgatggctcacgcctgtaatcccaccactttgggaggctgagcgggcagatcacaaggtcaggagatcaagacggcctgagtggtgaaaccctgtctctactaaaaatacaaaaattagctgggcatggtggcacgtgcctgtaatcccagctacttgggaggctgaggcaggagaactatttgaaccagggagtcggaggttgcagtgagcagagatcgcaccacagcactccagcctgggcaacagagcaagattccgtcccaaaacaaacaaacaaaaaactgtattgaacatgtacagaatttttttcttgtcattattccctaaacaatacagtataccaaaatttagcatttacattgtattaggtatcgtaagtaatctagagatgatttaaagtatataggaggatgtgtataggttatagggaactactacgccattttacatcagggacttgagcatccatggattttgggtatcctcagggagttctggaaccactctcccatgtttaccaagggacatctgcatatacgtcctgcaacctccgcctcctgggttcaagcgattctcctgcctcaggctcctgaggagctgggattacaggtgtgcaccactacaccaagctaatttttgtatttttagttgagacggggtttcaccacaatggccaggctggtcttgaactcctgacctcaggtgatccacccacctcggcctcccaaagtactgagattacaggcgtaagccaccatgcctggcctacacatgtgtcttctggggaatggcccaagcattcatcagcttctgaggacccaagactcaaaacagtttaaggaaccacagctttagctatttcagaaagtcccaaactagtacagtatgtaagaaataaagcacaccgtgggccagatagttgactctttctctctagtctatctggaatactcctaccaaagacattgcctttgttacaccaattccactcccaaggacctgcagtgttaccctactgcagacggcactgggcccagctcccctgctgggcatctaaggccctacagccgcaggtcccatccacagcagcatccagttgggctccccactttaccctgcctgaacccacacacaccaggtctggtgtctctgcatgtgtcctctctgtgtcctctctgcctctgcaagttctgctcatccttcccaccctgtccacggctcagctcctccagcagcctcccggaaacagttatgggaatcacaggacakcagagctacagggagcctcagagatcaggccgggaaaccaagctatggggaggaggaacttgcccaaagttgccctgtaagtcagtggcagaggtataacgagaactgaggtttcctgactcgccatccagtgctctgctgcactgacctcccacttctctgaactctggaggaatggcaatgactataaccmcaacttggcattccctgaacacctgtgtaatggcgtcagtgtgccgcattctaacaagaggaaatgctgctgtttcaactctgcatccattcccccactgcctctttccacaaaggagctgaggtggcagatgctgctctatttaaggctcatgcgatgcttcccatgcctgcgacttctccagactacaagcttcagagcacagggaggctgtgttgtcttggctcaagtggctcagcagagacaggcacactgtagagctaatgaggaacttactacgtcagttaaagttatcggtccaaagtcagagtgaaacactttctgagcaggggatcttgcctccatggccagcatctcagagccctcagggacagaacaggacaaggggacagaaggttccaggcgacagaacataaagagcctttccaatactcagagctgcctgaggcagtggtgagcctctcaacactgaaggcatgctagttagccagacagccacctgagggggccytgcactgggcactgacaggtacatggggcaaccagtgaacacaagcatatttgtcagccaaacctttgtgaagggaggcagcagggatcaatatatcagtgaagggctagagcacctattgctcgcataacaacaattaaagraaaaaacttaaaagtgggaaggaagggagaatggagaaggtagaaatttaagtcgtttaaagaatcttccagacttttcacaatggttcttcaataagtctgccattttaagaaagaacagaaggagatatagttaggaaaaaggcagccagtgttgtaaggtgtggaatgaggatgctgggcagacgctccagagctgtacgagagacagagagagagagagagagagagagagagagagagagagagagagagagagtgtgtgtgtgtgtgtgtgtgtgtgtgtgtgtgtgtgtgcgcgcgcgcgcgcgcatgcgtgtaagtggaaagttgaacctccttcctgtgtgctccaagagtctgcacaaagagyaaatcacctgtcttacagggccctgggccttcctracccttctttctcccccggggttggaagcccacagacccaaagggctgagtcatagtgtgcggaggtgcctggcccctggcagaaggcaacagggctggcaaagagcccaggctttcacaacggtcgggtgcccgtgtgctccaagtcggggaagtcactagcccaggaatttgcatatgtgagcgagaagcaccctttgctcctgcccctcgtgtatccccaagtgactccaggrtacctaagggatctgaacaggttctgtgcctctcacatggtagcaagtgacaggacacaaagagggcagcaggtcaagcccggggtcctgcccgtccactcaccatcgcattggcatggctgctgctctctggtgaattctgctcctcaggagtgaccacttcaaattcagaggaggtgccctgtgcagaaaggaagttaggtgctgcccgagagaaaaacagctcacccctcctctgcggccctgtggctgagagcagcaagggggacaaaatctcttcccattttgagtacacagggaccgttacatatcatctcacatragatcacaaagcaggattctcgacaagcctgtcatagccctctgcataatgtgaggtcatatcccctcgatggccaatcctcttttgtagaagggagatrtgggactagctgaccttgaaccagcagcactgtaggattgcattttttaaggccgtgtactttttaaatgctttcatgagctccattatttctcagggtgacccatggagtgggtcagaaggttatatcctctttggaaagatgaggaaactacagtatacagttggttaatgcaaaagcagggattgaacccaagactgcagatccagcattcctgccacggccccagagctgtctcttaggcccagacgtctctgatcggtttcccagaacacagatggcagctgttacggccaccaccaagcatgycctgtgctggccttcccaagccagtcctggagatcccagaggagtgaactgatctgagaaaagtcccagagatgattcaccaaatttggagactatttcaggattcaaccaaatccacggtggccaagaaatcccagattttttcacatctttccgtcattcctagtagaattactggtcattcaaccaaccaagaagccaatggcccacctgaaccagccattagctctgggatctgggatttccatgtcccgttaaacctggtctgcagcctcccttcatcccagaaaggggcaggatagatgagaggagtcagtgctcagcttccagctgaccctcatggccaccaagaactcacctctggctcttggccctgccctagaaagtctccctcctccatctacattttccccattacccgtgtaacctcagaacaggtycttctttccctgcacctgatctgtaggataaggatgctgaactatgcaatcccttgtaggataccaagcaaaacttctccagccaaatctgtagatttttttttttttttatgagagggtctgactctgtcacccaggctggagtgtggtggcatcaacatggctcactgcagccttgacctcctgggctcaagcgacccttctgcctcagccagcctcccaagtagctggaaccacagacatacaccatcacacctgactactttttttcttagagagatggagtctcactatcctgcccaggctggtctcaaactcctgggttcaagcaatcctcctgcctcagcctccccaagtgctgggattataggcatgagccactgcgcccagcctgtagaagatagtttctgagccctctttgagaatgtgagctccatgtcacatctgtctgttttcctagcactgtgcacactcagtgatacttaacagtatacaacttagtaagtgagaagaattccttgtacataccagggtcttcctggtaagttttaactatgaccttcatttcaaaatggggaggctgaggccccagagagtttgcgatggacttgcccaatatcacccagcgagacggaacacagtttcttgacctcaaccctctttcttcatgttcttgtatctgtcagtaggacttgaggtccatccaggcaacctccacccatgactccaaataaaacttacactggatggaggcttctggactggtgctggcttgtcactggggcatgcagrggctgtgggagatgctgtgacatttgagtcctttcctggagaatcaagaaagcacagatgaactgactgggaaggggagaagcccaggtaccaccctctcaaggacagcccttgacaaaagggttctcagacaggattccccactcgagtgtgggagaatgggaggtggtctcatcagggccaggtagtctgagaaaatggcctgccctggagtgacggggcagagcctgagcagagagaccatgctccctgggcttactgggaaaatcccaagttggctgctgctccttgctgccctgaacaggcctcaatgataaagacaatgatttacaatttgaaaagtctttatgtatctattatcccagccattctcataaaagccccatatccccattttaaaggtcaggacactgaggcttgggaaggtcatcamcttgcccacagccacatagccagcaactgcaaactcaggactgagacttggccctccctccctgacttcctgcagtccttgctgcagggagctccttgaaggtagcttcatttctcactctgagagtggacctggcaccaatcaggaactcaggaacattgctgaatagacaagcagaggctggaaatgcccactgactgcagcacagtggactctgagaccatcactttcctccatttgtccattcagcaaatgcaaccaccagccaatagaaggctgtcacattggcctgggccagataccatacagtagagctgcagcaggaggcatctgagtccagctgaggtgcggatcatttccatcctggtcccagaccttaccctggacttggagacatgccagagtaatgcacactctgtacgcatggtgatgcctctaccatacatgggacttcaaccccgagccacagtcaccctgtcctttaatgggcagcacacgtaaccttacatctgaaatacgctgcagcaggctaacaggcaagcccagcttcttccctgggcctcagcttccctaattgtaaaatggacgcgcagggcacgaccagggagcttccaactcatatgccagctccaagtgacagggagtagctgcttggagygcgatgcctggcacacagtagctgctcattaaatattaaatatgctgataaagaccccaaggccacaggactgcaatgtagtcaactgttgtatctattactcatgtctgctggggcctcaggagtgctgagtcactggctatttttaacaagattgttttgaagtcccttccaaatctgaccttctgggggatgtggcagccaaaacatgaatggaagggtagcctgtgacctaaggataaacgagagaatgtggrttttggcataagaagggagttcactgtgaaggatttgggcagtttggggtacagggagagtcagaggtacccagactcctcttatacctgtgagctcagccagggggtcgaaggagcccaaggagggagaaggtggtgggagcagctcgttgtccttcactagctcctctgccttctgccggagcctggtcgcttccatctgggactcttccaaaagctcccctagagttattggggaagaggaagcaaaagcatttactyggctcagtgtgctgcttctccccgtcccaggcccctaaccgtgctgccgcctggcttctgaggctccaggccctggacttcactcccaccgttgctctgtgggccaagtgggacaaactccatgctggtccaccataagaaacaggctagagcaaggacgagggcccagcaatcgggggacacaggagcggaaggaatctatgagaaactcctcggctcccccaacccccagcattctctttctgccccactcccttcacacccagccagggcactccacagaaagccaggggctcccccaccctacgggctacccacagcctgagccaccagggcaaagggctgcctgcagggcggagaccttggataattccaaccagccctctaggcctccattttccttctcctacaagtggagatggggaaaccactcctccctccccagtcggccatcccaagcaaggatctgccaagcaaggagaaagcattttaaaaatcagggggctatgctcccctctaaaacatgagactagagaagggcacggcaaggcaaaggaagagtttcaggagtgtggaagaaagagagccccctctggatggggaaatcaatgaaagccttgtctggaggagaagggggcacagcaactgggtgctgatgcacagggcccgtcggtcgtgtggagggaggtggggttgttctaaagtggggatggcttgagcaagagccaggagaagagaactgagggacctaccacctccttgcttcaagccaagctctgctccctgctccaacacctaggaacgcgtgccccagttgcctggtcatgctggctctccccatctctcgtgccccagaaagaggagrccactctagttccatggccattaactgggccttccagccccctttcccttagcccacgcctccctcttggacctgagtcctgtcatcctggtttccgggtgctgaggaatcagggttgggaatactgtcaccatgctacatggtgcatagagacagctgtgaggcaggagccagcrctgggccaggagggacaggggatgacttgggcagaggcatatgccagcttcattctccactgctagtagagggactggcatcacagtctgcagggaggggcgctcgcagggaggggacagggtctgctttacctaacatctttatcccttgcattttttccttcagccgggaattctccttcactaggcgctcaaaagctgcggatgcctctcctgagggcacgctgcccccagggtcgtagatccggtacggtcctctcccttccatgagggtagctcagcccctgccgtggtgcccgcctggctgtaaggacaacagcagcatatcagcaggctggccaggccatgggggcatcctttgcagagaagctctagtctgtcaatgccccagaaggcagtcccccactttaagctggtctgaccatattatagtaaagcaggacagtcacctccttttatctggacgctctgcctctattaatacaaccttagaatggcattagtttctcttagcagcctcaatgcactgttggcttgtttggaacaggagtccaaataaacagtagggtgcaatgtgggatacaagaaagaacctggacttggaaaaaaaaaaatctgagttcatgtcctgtctgtgaggtccagaagaacaggaatcccatatgttttacccatcattgcatcctcagagcctaccacagtattagctatgaattttgcccaataaacacttactcaattaatggtctaggcattaatttactatgggattatgggcagtcccttcccctctctgagggagggaaatgaaagtcttaagttaatttagtaatctttaaagtgaaatgcttgtaccctaagggataagcaagtcaacccagtccaaagttccatttatatgtgtatcatcttctttaaaaaaagaaaagaaaaaaacaccctgactaatatttaatacactgtcaccctcctccgtgagtctcatatcatatatggtctgtcccttgcagttctaaggaacagaagaatttttcatcaaaccactgtctatttgagcaccaaggtttttttttagtaatctgttcagtttcatctgctttatgtcactgaaaccagttggaaaggtgattttagaatcctaactctgtggcttagtagagaagctctctgtccattcactcatccattcaacaattacttattgagcatcgactccgtgckaggcaccagtctgggtgctgaggaattatcagcaaataaaacagacaaaaatccttcatggagcttatagtctaggggtgaaagcagaggaggatggtggggaacacaatatttcaggtaatcaaaaagtctatgcacaaaaggccccaagcataaggagctattttagccaagacctgaaagaggtgagggaactagccatgaagacatctgaaggaagaacattctttgcagagagaacagtaagggcagaggccctaaggctgaaacaccgagccagcctccagccctccaaatagctctccagcatgaaagggccaaggccttcactggggacctcagaagggtttgggggctcrgcaccttcctcccaaggtcaccacccccaagacaaaaactgtttcatcaggaatcctcaaagaccctcccaagtccacacaccatgctccgtgggtccttggcgctgccaggtgactacgaccataccaccctgctcccagaatgtaaatgaaagatcagagtgagaaaggattaacagcaacaccaccatgcttgaatcgcctccttgtcaggcactgcattaaatgtttcagatatacaatcttggaggagctgcacagtaactctaacatgcatactaatctcatctgcattttacaagggagaaactgaggctcagggcggttaagtaactcagccacgatgamccggccrcaataagagccaagatgcaaagtcagccctgcctgctgtgactctgacccccaccatactcacacagccaggacacagagscagaggggcagacagggagttcaaatctctttgtagggcagcaccatgctatcaggtcacctctgggcagtttcccttgccctgcagcataagaaccaataaggacttgtccaagagcgtccataggatggaatgggccagaaagaaaaacaaagttctgatgagaaggaccccttctcccaaagactgacagatacaagatgaatacaccrtgtgggaggcacccacgccctgctgagcctgcgaggcaaaggacagctacccacactcccatcacaagtcatcacccggcttaggggtgacttgtttttaacctgaaaggtcagtgttctacagcatagcacaaagygcagatgtttccaccgaactaagaaacagtgtgggggctgcacttagcactggaactggcacatagtaaagtactcaaaaatgtyggcagacattgggggtccttcccctctgcttgcctctgtcctcacgaggcttgccacctggtacagcatgtgtctgactggtgcgggcattgcccatctggctgggaacttcctgaggcaggagcgtactttgcacatctttgtattcctgtcgggagcacaggagggtgggccttccttgagagctgcttggagttcaagaacagtgaaacagagggctacaaggggcctggagccaccttgcatgacaarggcagcagtgtcctggttcttgtccaccattatgcatkcaccctaaatggaactcacagtcaacaccacatgaaggcatggggaatttcttactcaatgtctgccttgtcctgtagattagaggctgcatgaggacagggagcaagtccatcctgtgtgccagggtatcttcagagtggcccagagtagggcctcggtaaaccttgaattcagagaagtcagactgaagggaacaagcccttgaccccgaccccgcctcctgcaaggccatgtccaacatcccagagaaagcctaaccctgacccactgaccagacgcacttggacgcccagacacttctagaatccaggctgggccagccatgctccctcagagaggcccagatgtaaggcgaagggacaaagcaggatgcaggatgtgggaactgaaacccaccccacgtcctccaaaacacgcaacactcagtttctcttggcgctggggagtcaacgggaaaggggttcatgggaaacaaaaagtgggcagacagagctatgctcccctactttagcctcagggggcagagcttggggagaaagaaaggcagtgggcagaggagasgcaggagaaatatcctattgtgggaaaaccctctctggagatcagaggagccacccctggagggcctggacttctggaggaaagaaagacaaagagggaaacagggaatttccaagttctgctgacctcatgcccagatggtcagcggcagtccctggatgaccactgggcagacgggaactctccctctgatcaatgaggtttttataacttctcccagagagaggactcattctcaggatgacagagctggaggggactctccaagggcaatgaggcgaatcctgcattatcaggtgggagagagatgcacccagaaacactcaatggatgaggggctgcattcgaacatgacgatggcatgcactcccctctgctgtccacaaaccacgaggatgttttcaaaggggaaaaggaagcactgaccactcccctccatgtggcagtatctggagttcagagcccaggagtcctcgggcatgagctcatctgattctcactcacggcacaggcagtgcagcaaggcaaggccctgagcagggaaggccaaggtcacaaaggagtcaggatggagctgggaccagaagatccctgctctccctccaggctgcccacagcccatcctccatttcccttcctgcccagcaatcccatggcacaccacaggcccccaccacatcttctcrgagtctctttccacctggcctggttccacaaactacaaatcagcaggtgctccaccagcagtgggactccagccccgcttgcccaaaccagaaacagctggtggtatagaagcagccagcgcagactttcttccaaaacaagacctcagccagcggggcctccacagcctgccccagaggggccctggggctgcccgctggaaccagaaaggcccagtttgggggcagaaaggggcccagacagacggcaggtcaggcaacaaccacagaccgtgaagatggaagtgatgctgctgaaaccgaaggagccacccactagcaggcaagcacttgtgggtggcagggaggcagtagtccccagggctcaactctcagccttaccccagaaagagaggggtatgataaagactacattcagaattaaatttacattctagcttttgctctgaaatgctttggtctgtcagattatcttcccattagcagtgttctggtggctgggtaggggggtggtcccagaccccccaaatgatattcacttgcatagccactaacatttgcaaaatacttcatagtgtcccaagcattgtttttccatctgattatcacaacagccctgggaagaaggcagggctgatacctgcctgatggataaggaaactgaagtccagcttggggacttaatcagcccaatttaatgcctttggtcactggctgcatcctggggccagctatccctgcaaccctggagcaggtgatgccctccctggcccagagggaaaagtgtaagcaaatctctggtacagggaggtggaaggtcatcgaggccaacatctacctccccagcagaggtgagggctgccagggatgctggcaggtgggctggcagagggggtatagggaaggggtctccaggaaagacggcacagaacagaacgtcagagaggtctattctagtgtctactctgctgtgtatggaaccatgggctcattccctcacatgcaaggggaggagcatgggccacacagaaaccgggtgatggctaaagctggcctcaggatcaagaagacccaagtctcaggagctagcagcaagctgaggaaagagagagagccagcaccatggaaacatcgctgccttggaggcaggaagaaaggtccacacagggaaagtgctcaaggccaaccttgcgaacacgaggcctgagagggggcctcacctgcactagcctcagctctgtccaccctgtgggctgtgaaaccctggagcagccactcacctttcctgagcctcaggtgcctcatctgtaaagcaggagtaataatagaacctacctgatagaagatcaaagaaattaaatgaaacaatatgtgtatagttggaagggaattctcactttctactttaggcaatacttcctgattatctgatttaacaagaaacacatctttgttttataataagatttccaaaataataagagtatacagtaactagctcagcatttgacacacagcaggtgcttaataaaaggctgaggcaaccccacaactgtgcccagcttatctaagggccaaggctttccccatttgttctctcctttaatgggattttaggctcttccgtcagctcagtaagctaggttctggcctccacttattctctagtgacctgcatatcaccatttaactgtggttaagcagggtgcctggacacaccatagctagtgaacatgtagctataagaagcccttgaaccacgatgccacactcaccaacaactgggaatctgagcctcatttcctctgctgtaaagggcaatatcctgcaattccacccaaggatgaaaggaagtgagaygccatgatatcacattgcagacataaacaaaaaactgtccacatatttgtgttatgatgacctccagtcctccccaaccaatttccaggctggggaaactgcagcctcaggtccatccatcaaaggccgggttggatttttcaggcagtgaaactactctgttcaatactgtaatggtggacacctgccattccacatttgtccaaacccatagaacatacaccaccaagagggaacactgatgtaaaccatggactccgggtgacagtggtgtcaatgtagattcatcaactgtaaaaaatctaccactctggtggaggatgttgataatgggggaagctatgcctgttaggggtggggggggcgcagtatatgtaaaatctctgtaccttcttctcaattttgctgtgaacctaaaactgctctataaaaaataaggtctttaatttaaaagagaaaaggaccaggctgggctctcctgatggctgtcaggttcacacatgagtgaggacacagcacatacttgagacagtgtgtattcaaggaccgcaccctggcatcctcaccaacaaggagcccagacttaactcctccatccttgcaatcaactgagcaacaatgaggctgcagacacagagtctcatatagtaacagctggggcgccagaactgtgggatctagtcaaggtacactagggcgaacatcttaaccctcactaggcctcagttacctaaaaagagggagctgcaaaaatagtaataacatggggggttgtgcgggataatcattaaggccccttccagttctaacatttcaggatctgaaatttattagcactactttctttaaccttctaaccttaagaaggctccaatccccagctccaatcccttctaaggcccaggtggatttccctaacccatcagtcctcccataagagctttcataggtgctatcccctccccgagggcagtcagagaccctcagctgacatccgcagccctgtgccaggtcctcccctcctgcctaacttgtaccaggctctggccaagcctgatctgtgttcctcaacatggcacacatcttcccatgtccttcatcctcccctcccgagtcacccacaaagaaggccccactgtctccactcagcctccgaggcccagattacacaccacccgctaaacacctgagccagaattcacactgcaaaagaggactggagagcacctaactaagctggagagagggtgacagttcgttaggcgctaccgtatgccaggtgctgggccgcatcatgacgcacatgacctcattttcttcttgccacacagatatggaaattatcatccacactttccagcaaggaaaccagtcgacgcagctacatggatgaggaagcagactcagagaagtyaagtcatttgcctgagaatacacagctggttagtggtagaacaaataatgcagcctcaatctgtcagattccaacatcagtgccctttccactgctctacactgcctggagaggcggcaggctgaagctcagaggtgggaaaccagacctactttccagttctccagaacgtgccccaagttcctagcccctgcctttatatgtctctagctttatatgcaaccaggtggcaatctgccccacatcacctgcagtcaacagggtttagaatctcaggctggaagggagctcagaggacattccatcctgtgcttacccagtcctctgaggagcccagggactccagctggccaactttagcaatccagatctcaccaacttcctccccaaaacaattcctggggcagccagcactggctacagttaggctgctcccagttctgtttccactggcccttctctcccctctgtggtcccctggaataaggaacaagatgcccatcttcagcatgacagccagccctgaggacatttggaacctgcagccttctctatactgttccacatagggactgccccccctccagtcccccaccaaccctctaccccacactatctctagttggttctagcactggacccaacattccaggcatggtttgcctgaccaaatgcaggctttcacctccacccttttaggtagtatattcctattgagggagcctgggtatacatttgcttttcttacagctgagtcacctactgaagaatgtcctttctcaatgacaacaacctgcatgtatgcctaactggtgagaacaaagttctcatgtagaaacgtgtgcttgagggctgggtgcggtggctcatgcctgtaattccagcactttgggaggccgaggtgggcggatcacctgaggtcaggagttcgagatcagcctggccaacatggcaaaacccagtctctactaaaaatacaaaaattagccaggtgtggtggcgggtgcctgtagtcccagctactggggaggctgaggtaggagaatcgcttgaacttgggaggtggagattgcagtaagccgagatcacgccacagcactccagcctgggagacagagtgggactccatctcaaaagaaaaaaaaaaaaaaaaaggggtgtttgaggaggtgtgagttacctaagggggcagaagtaactgattgattcagtaatmccctatctaggaatctagagatctttgcatcagtacacagaagctggacaaaaatatgcactgccacatgctttgtaatagacatttttgctattcttgaatgtccatcaagaagggactggttaaacaaaccaccattcattcratggaatactatacagccatcaaaaagaatggggtagattgcttggcaatgatacagaaagatgcccataaaatacaaagcaaagtgcagatttatatgtgtaacaggatgctatttttttcaaaaacacattgtgtgtgtgtgtgtatacatacggaatcttaaatgtgcatagaaaaaggcctggaagcccagtgctttgggaggccaaggtgggaggattgcttgaggccaggggttcaagaccagcctgggcaaaaagcaagaatagattctctattaaaaaaaaacttttttacattagcagagcatggtggcacatgcctggagtcccagctactcggaaagttgaggtgggaggatcacttgagcccagcagttcaggctacagtgagctatgatcatgccactgaactccagcctgagtgacagactaatactctgtctcttaaaaaaaagaaaagaagaaaagaaaaaagtctcaaaggatacataccaaactgctactagtagactgctctacagaaggacctcggtaaggaactaaaaccaaaagaaacttttattttacctatgctattttaactctttacatgggaaatctagtcctgttcttatacaattataaaattagtttttaaatacagtagggacagaggaaggggaaaggaaggagagagaagacaactgtcattttttacattatatcttttgtactgcttgagttttggggggtttttccccaataatcatgtgctatttggtaattttttttaaagggaaattttaaaatatttttctaaaaaatttaagtgagctgagtgcagtggtgcatgcctgtagtcccagctactccagagacagacgcaggaggatggcctgaaaccagagtttatctaaccctgtaactcccctgcctccaagaggtaagatgccaattttggggaattcctcttatacaaaatatggtggaaagagggtttcacagattcaaatcctggctatgatcccttctcgaatgaccctgggtaggcctcactttccttgtttctccctatggaaatgttatgaggaccaagtaggaaccatagagttctctgtaaaccttaaaatgctacccagacaggagcagtaatggctgccaaggagctaggaaggaaaaggggctggacaggggctgaggtactcagatgaaagccaaagatgccttgtgttaacaacaaaaagctgaaagctacctaaaatgaagagaaaaatgaataaatacattgtggcaatttcctatcaggaaatactatacagcagtgaaaaaagaatgagccacagctggagatacgaacatgaatgaatctgggtctcactctgttgcccaggctggagtgcagtggcatgatctcagttcactgcaacttccacctcccagcccaagtcatcctcccaccttagcctctcaagtagctggaactacaggcatgcgccaccacacccagctaatttttgtattgtttgcagagatgggttttggccatgttgcccaagctggtctcaaactcctgggctcaagagatccacctgcctgctctgcctcccaaagwgccagtaaggcatgagtcaccacgctcagcctaaataacatttttaaacataaaaaaatactatgtattatttagggatgcacacattaaaaaaaaaactttaaagaaatgcaagaaaaaaaccccactaaattcagaacacttgtttcttgttggtggctgatgaaggagaaatttcaastgattggaaatgtgttatttcttaaaccagatgagtgagcatgtaggtgcctgcgtgttaccctcggtatctgagagactccttcaatttttcttttttctttttactgtattgtttgctttttttctgcttcaacttttattttagattcggggggtacatgtgcaggtttgctacctgggtatactgcgtgatttgggtaggggtgatcccatcacctgggtactgagcatagttcccaacagtttttcaactctgcctccctccctccccactctagcagtccccagtgtctactgttgccatctttatgtccatgaggacctgatatttagctccacttataagtgagaaaatgcagcatttggttttctgttcctgtgttaatgtgcttaggacaatattttctaaaagtctatgttgccagtttcctgaggaccagatcacgcaggagttgcacctgcagagacagaagtgggctggagagggaccagggctcctaagtctgctgctgaagctgactatagcgaaggcaaaggacaagtggcctgaaggccaacagagagcctggccaatgctctgcccagtgggtggagactgagccaaaggcccttgactcatagggcagtcccatacctgccctggcctctcagcatgactccttggtgacacaactcccacagcacccacacacctacacccacctaccccacacacacacccctgcctgggctgcccggtttgtccactgtgtaggtgctcaaggacgcagagctcctgcctctcaaggaacagcctcagggtgaggtccctgggagagaagagttcagctctgcccagagcagccctcagacaaacagccagctgctgctcaccagtcatccrttccaatctgaagagtgactgtcctgggccagtcatgggaaaatcatcaagaacttcccrcaatggtcatggtggccgccaaggtctttctctgggggttgggagctgtgctcccccacaaaacaaggggacccagctgccctgtgccttcctgtggcaactctctggaggatgcctggataccctccctacagacggccagggataggaggggcaggcactgcaggcatgtgggggcatagcagcaagaatctaggagggcaggcacagcaaggcctggcccagagggaaaccaggagctgccagagccaaagagagggtgacccaatcattggttgttatagagtttttaagacttggaagagaatgccctgagatgccanagagtgaaacattttcattctaaagctgggaaaccaaagtcggcaaaggcgaacagacgtgcccacagccacatgggacagcagtggcacagaagaaatgcacacctcgtcctctggtggccactgtgcactctcttaccacaccatgctactgctcaacctctccccctccctcacagtggtcaggtaagcaatgagggaaaatgatggaggtgagaaaggaagaacccgggct

SEQ ID NO: 6 - DNA, 1790 bp, Homo sapiens
gtgaatctctggggccaggaagaccctgctgcccggaagagcctcatgttccgtgggggctgggcggacatacatatacgggctccaggctgaacggctcgggccacttacacaccactgcctgataaccatgctggctgccacagtcctgaccctggccctgctgggcaatgcccatgcctgctccaaaggcacctcgcacgaggcaggcatcgtgtgccgcatcaccaagcctgccctcctggtgttgaaccacgagactgccaaggtgatccagaccgccttccagcgagccagctacccagatatcacgggcgagaaggccatgatgctccttggccaagtcaagtatgggttgcacaacatccagatcagccacttgtccatcgccagcagccaggtggagctggtggaagccaagtccattgatgtctccattcagaacgtgtctgtggtcttcaaggggaccctgaagtatggctacaccactgcctggtggctgggtattgatcagtccattgacttcgagatcgactctgccattgacctccagatcaacacacagctgacctgtgactctggtagagtgcggaccgatgcccctgactgctacctgtctttccataagctgctcctgcatctccaaggggagcgagagcctgggtggatcaagcagctgttcacaaatttcatctccttcaccctgaagctggtcctgaagggacagatctgcaaagagatcaacgtcatctctaacatcatggccgattttgtccagacaagggctgccagcatcctttcagatggagacattggggtggacatttccctgacaggtgatcccgtcatcacagcctcctacctggagtcccatcacaagggtcatttcatctacaagaatgtctcagaggacctccccctccccaccttctcgcccacactgctgggggactcccgcatgctgtacttctggttctctgagcgagtcttccactcgctggccaaggtagctttccaggatggccgcctcatgctcagcctgatgggagacgagttcaaggcagtgctggagacctggggcttcaacaccaaccaggaaatcttccaagaggttgtcggcggcttccccagccaggcccaagtcaccgtccactgcctcaagatgcccaagatctcctgccaaaacaagggagtcgtggtcaattcttcagtgatggtgaaattcctctttccacgcccagaccagcaacattctgtagcttacacatttgaagaggatatcgtgactaccgtccaggcctcctattctaagaaaaagctcttcttaagcctcttggatttccagattacaccaaagactgtttccaacttgactgagagcagctccgagtccatccagagcttcctgcagtcaatgatcaccgctgtgggcatccctgaggtcatgtctcggctcgaggtagtgtttacagccctcatgaacagcaaaggcgtgagcctcttcgacatcatcaaccctgagattatcactcgagatggcttcctgctgctgcagatggactttggcttccctgagcacctgctggtggatttcctccagagcttgagctagaagtctccaaggaggtcgggatggggcttgtagcagaaggcaagcaccaggctcacagctggaaccctggtgtctcctccagcgtggtggaagttgggttaggagtacggagatggagattggctcccaactcctccctatcctaaaggcccactggcattaaagtgctgtatccaag

SEQ ID NO: 7 - DNA, 507 bp, Homo sapiens
cagagcctccttcaagatgctgctggtcctgctctcagtggtccttctggctctgagctcagctcagagcacagataatgatgtgaactatgaagactttactttcaccataccagatgtagaggactcaagtcagagaccagatcagggaccccagagacctcctcctgaaggactcctacctagaccccctggtgatagtggtaaccaagatgatggtcctcagcagagaccaccaaaaccaggaggccatcaccgccatcctcccccacctccttttcaaaatcagcaacgaccaccccaacgaggacaccgtcaactctctctaccccgatttccttctgtcagcctgcaggaagcatcatcattcttccggagggacagaccagcaagacatccccaggagcaaccactctggtaatctagaattcagtggcagaaaataaataagaagataacttccttcagaaagccatgacattgaaataatgtggtcataactctttc

SEQ ID NO: 8 - DNA, 3024 bp, Homo sapiens
atggaagttttccccttgctcttggttttgtccgtctggtggtctcgaacctgggactcggcgaatgcggattcgatcattcacatcggagcaatttttgatgaatctgccaaaaaggatgatgaggtatttcgcactgcggttggtgaccttaaccagaatgaagagatcttacagactgagaaaatcacattttcagtgacgtttgttgatggcaacaaccctttccaagcagttcaagaagcctgtgaacttatgaatcaaggcatcttggccctggtcagctccattggctgcacgtcagcaggatccctccagtctttggcagacgccatgcatatcccccacctcttcattcagcgctcaacagctgggaccccaaggagtggctgtggactcacccggagcaacaggaatgatgactacactctctcagttcgcccacctgtctacttgcatgatgttatcctaagagtggtcacagagtatgcctggcagaaattcattatattctatgatagtgaatacgatatccgtggaatacaggagttcttggacaaagtctctcagcagggaatggatgttgcacttcagaaggtagaaaacaacatcaataaaatgattaccactctctttgacaccatgagaatagaagaactgaatcgctatcgagacactcttaggcgagcgatccttgttatgaatcctgctacagccaaatccttcattactgaggttgtggagactaatttggttgcttttgactgtcactggatcattataaatgaggaaataaacgatgtggacgtacaggaacttgtaagaaggtcaattggaaggttaacgattattcggcagacatttccaattccccagaacataagtcagcggtgtttccgtggcaaccatcgaatatcttcaacattgtgtgatccaaaggatccatttgctcagaatatggagatttccaacctttacatatatgacacggtgcttctgcttgctaatgcttttcataagaagctggaggaccgaaagtggcacagcatggcaagtctgtcatgtatcagaaagaactcaaagccctggcagggtgggcgctccatgttggagaccatcaagaagggtggagttagtgggttgactggagagctagaatttggagaaaatggaggcaatcccaatgtccactttgaaatccttggaaccaactatggagaagagcttggcagaggtgttcgaaaacttgggtgctggaatcctgtcacaggtctgaatgggtcactgactgacaagaaattggagaataacatgcgtggagtggttctacgtgtagtaactgttctggaagaaccttttgtgatggtctctgaaaatgtcttgtgtaagccgaagaaataccagggcttctccattgatgttttggatgccttatctaactacctgggttttaactacgaaatttacgtagcaccggatcacaaatacggaagcccacaagaagatgggacatggaatggcttggtaggagaacttgtctttaagagagccgacatagggatttctgctttaaccatcactccagatcgtgaaaatgtggtggactttacgacacgttacatggactactcagtgggggtactacttcgaagggctgaaaagacagtggatatgtttgcctgtcttgcaccatttgatctctctctatgggcttgcattgctggcacagtccttctggtgggtctactggtctacctcttgaactggcttaatcccccacgattacaaatgggatcaatgacgtctactactctctacaactccatgtggtttgtgtatggatcttttgtacaacaaggcggggaagtcccgtacacgactctggctacccgaatgatgatgggggcttggtggctatttgctttgattgttatctcatcttacacggcaaacctcgctgctttcctcactattacacgcattgaaagttccatccagtctctccaggacctttccaagcaaacagaaatcccttatggcacagtcctagactctgcggtatatgagcatgtccgcatgaaaggactgaatccttttgagagggacagcatgtattcccaaatgtggcggatgatcaaccgaagcaatggatcggagaacaatgttctggagtcccaggcaggcattcaaaaggtaaaatatggaaattatgctttcgtatgggatgcagctgtattggaatatgtggctatctatgacccagattgttccttttacaccattggaaatactgttgctgatcggggatatggaattgcattacaacatggcagtccttaccgagatgttttttcacaaaggatcctggagcttcagcagaatggtgacatggacatcctgaagcacaaatggtggcctaagaatggccagtgtgacctgtactcgtcagtggacacaaagcagaaaggaggcgccctggacataaagagctttgcaggggtcttttgtatcctggctgctggaattgtcctctcctgcttcatagccatgctggagacgtggtggaacaagaggaaaggctcccgggttccatcaaaagaggatgacaaggaaattgacctggagcacctccatagacgtgtaaatagcttgtgcacagatgacgacagcccccataaacagttttccacctcgtcaattgatttgacccctctggacattgacactttgccaacacgacaagcactggagcaaatcagtgatttcaggaacactcatattaccacaacaacctttatcccagagcagatccagactcttagccgcacactgtcagctaaagctgcttctggtttcacttttggcaacgtgcctgagcaccgaactggcccttttaggcacagggcacctaatgggggctttttcaggagtcctataaaaacaatgtcatctattccttatcaaccaactcctaccctggggctcaatctgggtaatgatccagaccgaggcacctccatatga

SEQ ID NO: 9 - DNA, 5876 bp, Homo sapiens
ggaattcatctgtaaaaatcactacatgtaacgtaggagacaagaaaaatattaatgacagaagatctgcgaacatgatgcacgtgaataattttccctttagaaggcattcctggatatgttttgatgtggacaatggcacatctgcgggacggagtcccttggatcccatgaccagcccaggatccgggctaattctccaagcaaattttgtccacagtcaacgacgggagtccttcctgtatcgatccgacagcgattatgacctctctccaaagtctatgtcccggaactcctccattgccagtgatatacacggagatgacttgattgtgactccatttgctcaggtcttggccagtctgcgaactgtacgaaacaactttgctgcattaactaatttgcaagatcgagcacctagcaaaagatcacccatgtgcaaccaaccatccatcaacaaagccaccataacagaggaggcctaccagaaactggccagcgagaccctggaggagctggactggtgtctggaccagctagagaccctacagaccaggcactccgtcagtgagatggcctccaacaagtttaaaaggatgcttaatcgggagctcacccatctctctgaaatgagtcggtctggaaatcaagtgtcagagtttatatcaaacacattcttagataagcaacatgaagtggaaattccttctccaactcagaaggaaaaggagaaaaagaaaagaccaatgtctcagatcagtggagtcaagaaattgatgcacagctctagtctgactaattcaagtatcccaaggtttggagttaaaactgaacaagaagatgtccttgccaaggaactagaagatgtgaacaaatggggtcttcatgttttcagaatagcagagttgtctggtaaccggcccttgactgttatcatgcacaccatttttcaggaacgggatttattaaaaacatttaaaattccagtagatactttaattacatatcttatgactctcgaagaccattaccatgctgatgtggcctatcacaacaatatccatgctgcagatgttgtccagtctactcatgtgctattatctacacctgctttggaggctgtgtttacagatttggagattcttgcagcaatttttgccagtgcaatacatgatgtagatcatcctggtgtgtccaatcaatttctgatcaatacaaactctgaacttgccttgatgtacaatgattcctcagtcttagagaaccatcatttggctgtgggctttaaattgcttcaggaagaaaactgtgacattttccagaatttgaccaaaaaacaaagacaatctttaaggaaaatggtcattgacatcgtacttgcaacagatatgtcaaaacacatgaatctactggctgatttgaagactatggttgaaactaagaaagtgacaagctctggagttcttcttcttgataattattccgataggattcaggttcttcagaatatggtgcactgtgcagatctgagcaacccaacaaagcctctccagctgtaccgccagtggacggaccggataatggaggagttcttccgccaaggagaccgagagagggaacgtggcatggagataagccccatgtgtgacaagcacaatgcttccgtggaaaaatcacaggtgggcttcatagactatattgttcatcccctctgggagacatgggcagacctcgtccaccctgacgcccaggatattttggacactttggaggacaatcgtgaatggtaccagagcacaatccctcagagcccctctcctgcacctgatgacccagaggagggccggcagggtcaaactgagaaattccagtttgaactaactttagaggaagatggtgagtcagacacggaaaaggacagtggcagtcaagtggaagaagacactagctgcagtgactccaagactctttgtactcaagactcagagtctactgaaattccccttgatgaacaggttgaagaggaggcagtaggggaagaagaggaaagccagcctgaagcctgtgtcatagatgatcgttctcctgacacgtaacagtgcaaaaactttcatgccttttttttttttaagtagaaaaattgtttccaaagtgcatgtcacatgccacaaccacggtcacacctcactgtcatctgccaggacgtttgttgaacaaaactgaccttgactactcagtccagcgctcaggaatatcgtaaccagttttttcacctccatgtcatccgagcaaggtggacatcttcacgaacagcgtttttaacaagatttcagcttggtagagctgacaaagcagataaaatctactccaaattattttcaagagagtgtgactcatcaggcagcccaaaagtttattggacttggggtttctattcctttttatttgtttgcaatattttcagaagaaaggcattgcacagagtgaacttaatggacgaagcaacaaatatgtcaagaacaggacatagcacgaatctgttaccagtaggaggaggatgagccacagaaattgcataattttctaatttcaagtcttcctgatacatgactgaatagtgtggttcagtgagctgcactgacctctacattttgtatgatatgtaaaacagattttttgtagagcttacttttattattaaatgtattgaggtattatatttaaaaaaaactatgttcagaacttcatctgccactggttatttttttctaaggagtaacttgcaagttttcagtacaaatctgtgctacactggataaaaatctaatttatgaattttacttgcaccttatagttcatagcaattaactgatttgtagtgattcattgtttgttttatataccaatgacttccatattttaaaagagaaaaacaactttatgttgcaggaaaccctttttgtaagtctttattatttactttgcattttgtttcactctttccagataagcagagttgctcttcaccagtgtttttcttcatgtgcaaagtgactatttgttctataatacttttatgtgtgttatatcaaatgtgtcttaagcttcatgcaaactcagtcatcagttcgtgttgtctgaagcaagtgggaaatatataaatacccagtagctaaaatggtcagtcttttttagatgttttcctacttagtatctcctaataacgttttgctgtgtcactagatgttcatttcacaagtgcatgtctttctaataatccacacatttcatgctctaataatccacacatttcatgctcatttttattgtttttacagccagttatagcaagaaaaaggtttttccccttgtgctgctttataatttagcgtgtgtctgaaccttatccatgtttgctagatgaggtcttgtcaaatatatcactaccattgtcaccggtgaaaagaaacaggtagttaagttagggttaacattcatttcaaccacgaggttgtatatcatgactagcttttactcttggtttacagagaaaagttaaacaaccaactaggcagtttttaagaatattaacaatatattaacaaacaccaatacaactaatcctatttggttttaatgatttcaccatgggattaagaactatatcaggaacatccctgagaaacggctttaagtgtagcaactactcttccttaatggacagccacataacgtgtaggaagtcctttatcacttatcctcgatccataagcatatcttgcagaggggaactacttctttaaacacatggagggaaagaagatgatgccactggcaccagagggttagtactgtgatgcatcctaaaatatttattatattggtaaaaattctggttaaataaaaaattagagatcactcttggctgatttcagcaccaggaactgtattacagttttagagattaattcctagtgtttacctgattatagcagttggcatcatggggcatttaattctgactttatccccacgtcagccttaataaagtcttctttaccttctctatgaagactttaaagcccaaataatcatttttcacattgatattcaagaattgagatagatagaagccaaagtgggtatctgacaagtggaaaatcaaacgtttaagaagaattacaactctgaaaagcatttatatgtggaacttctcaaggagcctcctggggactggaaagtaagtcatcagccaggcaaatgactcatgctgaagagagtccccatttcagtcccctgagatctagctgatgcttagatcctttgaaataaaaattatgtctttataactctgatcttttacataaagcagaagaggaatcaactagttaattgcaaggtttctactctgtttcctctgtaaagatcagatggtaatctttcaaataagaaaaaaataaagacgtatgtttgaccaagtagtttcacaagaatatttgggaacttgtttcttttaattttatttgtccctgagtgaagtctagaaagaaaggtaaagagtctagagtttattcctctttccaaaacattctcattcctctcctccctacacttagtatttcccccacagagtgcctagaatcttaataatgaataaaataaaaagcagcaatatgtcattaacaaatccagacctgaaagggtaaagggtttataactgcactaataaagagaggctctttttttttcttccagtttgttggtttttaatggtaccgtgttgtaaagatacccactaatggacaatcaaattgcagaaaaggctcaatatccaagagacagggactaatgcactgtacaatctgcttatccttgcccttctctcttgccaaagtgtgcttcagaaatatatactgctttaaaaaagaataaaagaatatccttttacaagtggctttacatttcctaaaatgccataagaaaatgcaatatctgggtactgtatggggaaaaaaatgtccaagtttgtgtaaaaccagtgcatttcagcttgcaagttactgaacacaataatgctgttttaattttgttttatatcagttaaaattcacaataatgtagatagaacaaattacagacaaggaaagaaaaaacttgaatgaaatggattttacagaaagctttatgataatttttgaatgcattatttattttttgtgccatgcattttttttctcaccaaatgaccttacctgtaatacagtcttgtttgtctgtttacaaccatgtatttattgcaatgtacatactgtaatgttaattgtaaattatctgttcttattaaaacatcatcccatgatggggtggtgttgatatatttggaaactcttggtgagagaatgaatggtgtgtatacatactctgtacatttttcttttctcctgtaatatagtcttgtcaccttagagcttgtttatggaagattcaagaaaactataaaatacttaaagatatataaatttaaaaaaacatagctgcaggtctttggtcccagggctgtgccttaactttaaccaatattttcttctgttttgctgcatttgaaaggtaacagtggagctagggctgggcattttacatccaggcttttaattgattagaattctgccaataggtggattttacaaaaccacagacaacctctgaaagattctgagacccttttgagacagaagctcttaagtacttcttgccagggagcagcactgcatgtgtgatggttgtttgccatctgttgatcaggaactacttcagctacttgcatttgattatttcctttttttttttttttaactcggaaacacaactgggggaat

SEQ ID NO: 10 - DNA, 1856 bp, Homo sapiens
agccaaaagaggaagggaccggcctcccacgtccacagggacctgacttccacctctctgcccagatttgcttatgtcactgtcgccccgggacggggaggtggggagctgagggcaagtcgcgcccgcccctgaaatcccagccgcctagcgattggctgcaagggtctcggcttggccgcggattaatcacacccgagggcttgaaaggtggctgggagcgccggacacctcagacggacggtggccagggatcaggcagcggctcaggcgaccctgagtgtgcccccaccccgccatggcccggctgctgcaggcgtcctgcctgctttccctgctcctggccggcttcgtctcgcagagccggggacaagagaagtcgaagatggactgccatggtggcataagtggcaccatttacgagtacggagccctcaccattgatggggaggagtacatccccttcaagcagtatgctggcaaatacgtcctctttgtcaacgtggccagctactgaggcctgacgggccagtacattgaactgaatgcactacaggaagagcttgcaccattcggtctggtcattctgggctttccctgcaaccaatttggaaaacaggaaccaggagagaactcagagatccttcctaccctcaagtatgtccgaccaggtggaggctttgtccctaatttccagctctttgagaaaggggatgtcaatggagagaaagagcagaaattctacactttcctaaagaactcctgtcctcccacctcggagctcctgggtacatctgaccgcctcttctgggaacccatgaaggttcacgacatccgctggaactttgagaagttcctggtggggccagatggtatacccatcatgcgctggcaccaccggaccacggtcagcaacgtcaagatggacatcctgtcctacatgaggcggcaggcagccctgggggtcaagaggaagtaactgaaggccgtctcatcccatgtccaccatgtaggggagggactttgttcaggaagaaatccgtgtctccaaccacactatctacccatcacagacccctttcctatcactcaaggccccagcctggcacaaatggatgcatacagttctgtgtactgccaggcatgtgggtgtgggtgcaatgtgggtgtttacacacatgcctacaggtatgcgtgattgtgtgtgtgtgcatgggtgtacagccacgtgtctacctatgtgtctttctgggaatgtgtaccatctgtgtgcctgcagctgtgtagtgctggacagtgacaaccctttctctccagttctccactccaatgataatagttcacttatacctaaacccaaaggaaaaaccagctctaggtccaattgttctgctctaactgatacctcaaccttggggccagcatctcccactgcctccaaatattagtaactatgactgacgtccccagaagtttctgggtctaccacactccccaaccccccactcctacttcctgaagggccctcccaaggctacatccccaccccacagttctccctgagagagatcaacctccctgagatcaaccaaggcagatgtgacagcaagggccacggaccccatggcaggggtggcgtcttcatgagggaggggcccaaagcccttgtgggcggacctcccctgagcctgtctgaggggccagcccttagtgcattcaggctaaggcccctgggcagggatgccacccctgctccttcggaggacgtgccctcacccctcactggtccactggcttgagactcaccccgtctgcccagtaaaagcctttctgcagcaaaaaaaaaaaaaaaaaaa

SEQ ID NO: 11 - protein, 493 aa, Homo sapiens
MLAATVLTLALLGNAHACSKGTSHEAGIVCRITKPALLVLNHETAKVIQTAFQRASYPDITGEKAMMLLGQVKYGLHNIQISHLSIASSQVELVEAKSIDVSIQNVSVVFKGTLKYGYTTAWWLGIDQSIDFEIDSAIDLQINTQLTCDSGRVRTDAPDCYLSFHKLLLHLQGEREPGWIKQLFTNFISFTLKLVLKGQICKEINVISNIMADFVQTRAASILSDGDIGVDISLTGDPVITASYLESHHKGHFIYKNVSEDLPLPTFSPTLLGDSRMLYFWFSERVFHSLAKVAFQDGRLMLSLMGDEFKAVLETWGFNTNQEIFQEVVGGFPSQAQVTVHCLKMPKISCQNKGVVVNSSVMVKFLFPRPDQQHSVAYTFEEDIVTTVQASYSKKKLFLSLLDFQITPKTVSNLTESSSESIQSFLQSMITAVGIPEVMSRLEVVFTALMNSKGVSLFDIINPEIITRDGFLLLQMDFGFPEHLLVDFLQSLS

SEQ ID NO: 12 - protein, 134 aa, Homo sapiens
MLLVLLSVVLLALSSAQSTDNDVNYEDFTFTIPDVEDSSQRPDQGPQRPPPEGLLPRPPGDSGNQDDGPQQRPPKPGGHHRHPPPPPFQNQQRPPQRGHRQLSLPRFPSVSLQEASSFFRRDRPARHPQEQPLW

SEQ ID NO: 13 - protein, 1007 aa, Homo sapiens
MEVFPLLLVLSVWWSRTWDSANADSIIHIGAIFDESAKKDDEVFRTAVGDLNQNEEILQTEKITFSVTFVDGNNPFQAVQEACELMNQGILALVSSIGCTSAGSLQSLADAMHIPHLFIQRSTAGTPRSGCGLTRSNRNDDYTLSVRPPVYLHDVILRVVTEYAWQKFIIFYDSEYDIRGIQEFLDKVSQQGMDVALQKVENNINKMITTLFDTMRIEELNRYRDTLRRAILVMNPATAKSFITEVVETNLVAFDCHWIIINEEINDVDVQELVRRSIGRLTIIRQTFPIPQNISQRCFRGNHRISSTLCDPKDPFAQNMEISNLYIYDTVLLLANAFHKKLEDRKWHSMASLSCIRKNSKPWQGGRSMLETIKKGGVSGLTGELEFGENGGNPNVHFEILGTNYGEELGRGVRKLGCWNPVTGLNGSLTDKKLENNMRGVVLRVVTVLEEPFVMVSENVLCKPKKYQGFSIDVLDALSNYLGFNYEIYVAPDHKYGSPQEDGTWNGLVGELVFKRADIGISALTITPDRENVVDFTTRYMDYSVGVLLRRAEKTVDMFACLAPFDLSLWACIAGTVLLVGLLVYLLNWLNPPRLQMGSMTSTTLYNSMWFVYGSFVQQGGEVPYTTLATRMMMGAWWLFALIVISSYTANLAAFLTITRIESSIQSLQDLSKQTEIPYGTVLDSAVYEHVRMKGLNPFERDSMYSQMWRMINRSNGSENNVLESQAGIQKVKYGNYAFVWDAAVLEYVAIYDPDCSFYTIGNTVADRGYGIALQHGSPYRDVFSQRILELQQNGDMDILKHKWWPKNGQCDLYSSVDTKQKGGALDIKSFAGVFCILAAGIVLSCFIAMLETWWNKRKGSRVPSKEDDKEIDLEHLHRRVNSLCTDDDSPHKQFSTSSIDLTPLDIDTLPTRQALEQISDFRNTHITTTTFIPEQIQTLSRTLSAKAASGFTFGNVPEHRTGPFRHRAPNGGFFRSPIKTMSSIPYQPTPTLGLNLGNDPDRGTSI

SEQ ID NO: 14 - protein, 673 aa, Homo sapiens
MMHVNNFPFRRHSWICFDVDNGTSAGRSPLDPMTSPGSGLILQANFVHSQRRESFLYRSDSDYDLSPKSMSRNSSIASDIHGDDLIVTPFAQVLASLRTVRNNFAALTNLQDRAPSKRSPMCNQPSINKATITEEAYQKLASETLEELDWCLDQLETLQTRHSVSEMASNKFKRMLNRELTHLSEMSRSGNQVSEFISNTFLDKQHEVEIPSPTQKEKEKKKRPMSQISGVKKLMHSSSLTNSSIPRFGVKTEQEDVLAKELEDVNKWGLHVFRIAELSGNRPLTVIMHTIFQERDLLKTFKIPVDTLITYLMTLEDHYHADVAYHNNIHAADVVQSTHVLLSTPALEAVFTDLEILAAIFASAIHDVDHPGVSNQFLINTNSELALMYNDSSVLENHHLAVGFKLLQEENCDIFQNLTKKQRQSLRKMVIDIVLATDMSKHMNLLADLKTMVETKKVTSSGVLLLDNYSDRIQVLQNMVHCADLSNPTKPLQLYRQWTDRIMEEFFRQGDRERERGMEISPMCDKHNASVEKSQVGFIDYIVHPLWETWADLVHPDAQDILDTLEDNREWYQSTIPQSPSPAPDDPEEGRQGQTEKFQFELTLEEDGESDTEKDSGSQVEEDTSCSDSKTLCTQDSESTEIPLDEQVEEEAVGEEEESQPEACVIDDRSPDT

SEQ ID NO: 15 - protein, 226 aa, Homo sapiens
  MOD_RES (73): selenocystein
MARLLQASCLLSLLLAGFVSQSRGQEKSKMDCHGGISGTIYEYGALTIDGEEYIPFKQYAGKYVLFVNVASYXGLTGQYIELNALQEELAPFGLVILGFPCNQFGKQEPGENSEILPTLKYVRPGGGFVPNFQLFEKGDVNGEKEQKFYTFLKNSCPPTSELLGTSDRLFWEPMKVHDIRWNFEKFLVGPDGIPIMRWHHRTTVSNVKMDILSYMRRQAALGVKRK

SEQ ID NO: 16 - DNA, 30 bp, Artificial Sequence
  Description of Artificial Sequence: Synthetic primer
acgttggatgttgtagcagaaggcaagcac

SEQ ID NO: 17 - DNA, 20 bp, Artificial Sequence
  Description of Artificial Sequence: Synthetic primer
gattaccagagtggttgctc

SEQ ID NO: 18 - DNA, 21 bp, Artificial Sequence
  Description of Artificial Sequence: Synthetic primer
gtttaacagcaaccattgagg

SEQ ID NO: 19 - DNA, 20 bp, Artificial Sequence
  Description of Artificial Sequence: Synthetic primer
gaatccctgttcattccttg

SEQ ID NO: 20 - DNA, 20 bp, Artificial Sequence
  Description of Artificial Sequence: Synthetic primer
aactcactggtgatcctgcg

SEQ ID NO: 21 - DNA, 30 bp, Artificial Sequence
  Description of Artificial Sequence: Synthetic primer
acgttggatgtccatctccgtactcctaac

SEQ ID NO: 22 - DNA, 20 bp, Artificial Sequence
  Description of Artificial Sequence: Synthetic primer
cctgcaggaagcatcatcat

SEQ ID NO: 23 - DNA, 20 bp, Artificial Sequence
  Description of Artificial Sequence: Synthetic primer
ccccaaaggtatgttaagag

SEQ ID NO: 24 - DNA, 20 bp, Artificial Sequence
  Description of Artificial Sequence: Synthetic primer
atacctaggtataacctcgg

SEQ ID NO: 25 - DNA, 20 bp, Artificial Sequence
  Description of Artificial Sequence: Synthetic primer
tgtctcatccacaccactcc

SEQ ID NO: 26 - DNA, 18 bp, Artificial Sequence
  Description of Artificial Sequence: Synthetic primer
cctggtgtctcctccagc

SEQ ID NO: 27 - DNA, 21 bp, Artificial Sequence
  Description of Artificial Sequence: Synthetic primer
tgtcttgctggtctgtccctc

SEQ ID NO: 28 - DNA, 21 bp, Artificial Sequence
  Description of Artificial Sequence: Synthetic primer
cagcaaccattgagggtgaat

SEQ ID NO: 29 - DNA, 21 bp, Artificial Sequence
  Description of Artificial Sequence: Synthetic primer
ccctaaaaactgttccaggta

SEQ ID NO: 30 - DNA, 19 bp, Artificial Sequence
  Description of Artificial Sequence: Synthetic primer
gggcctcagtagttccagc

SEQ ID NO: 31 - DNA, 20 bp, Artificial Sequence
  Description of Artificial Sequence: Synthetic primer
ttgtatatgtagggtcctgc

SEQ ID NO: 32 - DNA, 20 bp, Artificial Sequence
  Description of Artificial Sequence: Synthetic primer
atccaacaacagcttcccag

SEQ ID NO: 33 - DNA, 20 bp, Artificial Sequence
  Description of Artificial Sequence: Synthetic primer
ataaatacaacccagcccac

SEQ ID NO: 34 - DNA, 20 bp, Artificial Sequence
  Description of Artificial Sequence: Synthetic primer
catttaccatgtaactgccg

SEQ ID NO: 35 - DNA, 20 bp, Artificial Sequence
  Description of Artificial Sequence: Synthetic primer
acactcatccctccattctg

SEQ ID NO: 36 - DNA, 20 bp, Artificial Sequence
  Description of Artificial Sequence: Synthetic primer
gtcactaaactatgtatcag

SEQ ID NO: 37 - DNA, 20 bp, Artificial Sequence
  Description of Artificial Sequence: Synthetic primer
agtcagtgcctgactttacc

SEQ ID NO: 38 - DNA, 21 bp, Artificial Sequence
  Description of Artificial Sequence: Synthetic primer
actgcactccagcctgggtga

SEQ ID NO: 39 - DNA, 20 bp, Artificial Sequence
  Description of Artificial Sequence: Synthetic primer
gctagacatgttttagcagg

SEQ ID NO: 40 - DNA, 20 bp, Artificial Sequence
  Description of Artificial Sequence: Synthetic primer
ctgatcattcttaccggcac

SEQ ID NO: 41 - DNA, 20 bp, Artificial Sequence
  Description of Artificial Sequence: Synthetic primer
caaggaacaaagcaagaccc

SEQ ID NO: 42 - DNA, 20 bp, Artificial Sequence
  Description of Artificial Sequence: Synthetic primer
gtattcagagtggtgtgtgg

SEQ ID NO: 43 - DNA, 20 bp, Artificial Sequence
  Description of Artificial Sequence: Synthetic primer
tccctgtccttgaactcatc

SEQ ID NO: 44 - DNA, 20 bp, Artificial Sequence
  Description of Artificial Sequence: Synthetic primer
agggtcctccatgattggag

SEQ ID NO: 45 - DNA, 20 bp, Artificial Sequence
  Description of Artificial Sequence: Synthetic primer
tagatgggctgtttctactg

SEQ ID NO: 46 - DNA, 20 bp, Artificial Sequence
  Description of Artificial Sequence: Synthetic primer
tcccaaagtgctgggattac

SEQ ID NO: 47 - DNA, 20 bp, Artificial Sequence
  Description of Artificial Sequence: Synthetic primer
tccttccgtgatctcacaac

SEQ ID NO: 48 - DNA, 20 bp, Artificial Sequence
  Description of Artificial Sequence: Synthetic primer
tcttagcctgggactttctg

SEQ ID NO: 49 - DNA, 20 bp, Artificial Sequence
  Description of Artificial Sequence: Synthetic primer
caagttcttcctccatccac

SEQ ID NO: 50 - DNA, 19 bp, Artificial Sequence
  Description of Artificial Sequence: Synthetic primer
ttttccccctttttggggc

SEQ ID NO: 51 - DNA, 20 bp, Artificial Sequence
  Description of Artificial Sequence: Synthetic primer
ataaacgggaaagaagagac

SEQ ID NO: 52 - DNA, 20 bp, Artificial Sequence
  Description of Artificial Sequence: Synthetic primer
gtcttgacaggtttgaggag

SEQ ID NO: 53 - DNA, 20 bp, Artificial Sequence
  Description of Artificial Sequence: Synthetic primer
gaaacatgagtcgggatggc

SEQ ID NO: 54 - DNA, 20 bp, Artificial Sequence
  Description of Artificial Sequence: Synthetic primer
actagcccagagagaggagt

SEQ ID NO: 55 - DNA, 20 bp, Artificial Sequence
  Description of Artificial Sequence: Synthetic primer
cacaaatccctatacctggc

SEQ ID NO: 56 - DNA, 20 bp, Artificial Sequence
  Description of Artificial Sequence: Synthetic primer
aacctggctcagatctgaac

SEQ ID NO: 57 - DNA, 20 bp, Artificial Sequence
  Description of Artificial Sequence: Synthetic primer
ttagaggggctgttggagag

SEQ ID NO: 58 - DNA, 20 bp, Artificial Sequence
  Description of Artificial Sequence: Synthetic primer
agtatcttgactttatttgg

SEQ ID NO: 59 - DNA, 20 bp, Artificial Sequence
  Description of Artificial Sequence: Synthetic primer
taaaaggctagaagtccacc

SEQ ID NO: 60 - DNA, 20 bp, Artificial Sequence
  Description of Artificial Sequence: Synthetic primer
aggcccagcctgggaagttt

SEQ ID NO: 61 - DNA, 20 bp, Artificial Sequence
  Description of Artificial Sequence: Synthetic primer
tcgtgcccatcctgttagtg

SEQ ID NO: 62 - DNA, 20 bp, Artificial Sequence
  Description of Artificial Sequence: Synthetic primer
aggcagcaagcaccacaatg

SEQ ID NO: 63 - DNA, 20 bp, Artificial Sequence
  Description of Artificial Sequence: Synthetic primer
gcaaagagatcaacgtcatc

SEQ ID NO: 64 - DNA, 20 bp, Artificial Sequence
  Description of Artificial Sequence: Synthetic primer
actgctgtcttctgaggcat

SEQ ID NO: 65 - DNA, 20 bp, Artificial Sequence
  Description of Artificial Sequence: Synthetic primer
tctatagacttgcccaacgc

SEQ ID NO: 66 - DNA, 20 bp, Artificial Sequence
  Description of Artificial Sequence: Synthetic primer
attcggcttctgtcatcctc

SEQ ID NO: 67 - DNA, 20 bp, Artificial Sequence
  Description of Artificial Sequence: Synthetic primer
tggctgactggcctgaccac

SEQ ID NO: 68 - DNA, 20 bp, Artificial Sequence
  Description of Artificial Sequence: Synthetic primer
tacttctggttctctgagcg

SEQ ID NO: 69 - DNA, 20 bp, Artificial Sequence
  Description of Artificial Sequence: Synthetic primer
acacacacataccacatgcc

SEQ ID NO: 70 - DNA, 20 bp, Artificial Sequence
  Description of Artificial Sequence: Synthetic primer
tgagtagttgggactatagg

SEQ ID NO: 71 - DNA, 20 bp, Artificial Sequence
  Description of Artificial Sequence: Synthetic primer
ctctgagcccagagttgatc

SEQ ID NO: 72 - DNA, 20 bp, Artificial Sequence
  Description of Artificial Sequence: Synthetic primer
gcctgagttcagaagggaag

SEQ ID NO: 73 - DNA, 20 bp, Artificial Sequence
  Description of Artificial Sequence: Synthetic primer
gcctgcccaatattgtgagt

SEQ ID NO: 74 - DNA, 20 bp, Artificial Sequence
  Description of Artificial Sequence: Synthetic primer
tcttcccttctgaactcagg

SEQ ID NO: 75 - DNA, 20 bp, Artificial Sequence
  Description of Artificial Sequence: Synthetic primer
cacaactcacaatattgggc

SEQ ID NO: 76 - DNA, 20 bp, Artificial Sequence
  Description of Artificial Sequence: Synthetic primer
atcacatgccccaagaaacc

SEQ ID NO: 77 - DNA, 20 bp, Artificial Sequence
  Description of Artificial Sequence: Synthetic primer
agggcatcccagaacagaac

SEQ ID NO: 78 - DNA, 20 bp, Artificial Sequence
  Description of Artificial Sequence: Synthetic primer
gagttcagggtaggaatagc

SEQ ID NO: 79 - DNA, 20 bp, Artificial Sequence
  Description of Artificial Sequence: Synthetic primer
gacccctgtcttccacaggt

SEQ ID NO: 80 - DNA, 20 bp, Artificial Sequence
  Description of Artificial Sequence: Synthetic primer
tttctctccccaggatatcg

SEQ ID NO: 81 - DNA, 20 bp, Artificial Sequence
  Description of Artificial Sequence: Synthetic primer
tgttggtggggaaatgtggc

SEQ ID NO: 82 - DNA, 20 bp, Artificial Sequence
  Description of Artificial Sequence: Synthetic primer
tccagggaggactcaccatg

SEQ ID NO: 83 - DNA, 20 bp, Artificial Sequence
  Description of Artificial Sequence: Synthetic primer
ttgatacttagcggtcctgg

SEQ ID NO: 84 - DNA, 20 bp, Artificial Sequence
  Description of Artificial Sequence: Synthetic primer
tctaccagcttggctccctc

SEQ ID NO: 85 - DNA, 18 bp, Artificial Sequence
  Description of Artificial Sequence: Synthetic primer
gtagcagaaggcaagcac

SEQ ID NO: 86 - DNA, 20 bp, Artificial Sequence
  Description of Artificial Sequence: Synthetic primer
actggtgagacaatcccttc

SEQ ID NO: 87 - DNA, 20 bp, Artificial Sequence
  Description of Artificial Sequence: Synthetic primer
tgaaaagaggtggacggcac

SEQ ID NO: 88 - DNA, 20 bp, Artificial Sequence
  Description of Artificial Sequence: Synthetic primer
gaggcttaccaaaatgggac

SEQ ID NO: 89 - DNA, 20 bp, Artificial Sequence
  Description of Artificial Sequence: Synthetic primer
agctggactttgaggatggc

SEQ ID NO: 90 - DNA, 20 bp, Artificial Sequence
  Description of Artificial Sequence: Synthetic primer
gttgtttaggccaaaaagtc

SEQ ID NO: 91 - DNA, 20 bp, Artificial Sequence
  Description of Artificial Sequence: Synthetic primer
aagcccatggcttttcaagg

SEQ ID NO: 92 - DNA, 20 bp, Artificial Sequence
  Description of Artificial Sequence: Synthetic primer
gcagaggggaaagatcttgg

SEQ ID NO: 93 - DNA, 20 bp, Artificial Sequence
  Description of Artificial Sequence: Synthetic primer
tgaactaaggaccaggcaag

SEQ ID NO: 94 - DNA, 20 bp, Artificial Sequence
  Description of Artificial Sequence: Synthetic primer
aaatgatatggaattatgcg

SEQ ID NO: 95 - DNA, 20 bp, Artificial Sequence
  Description of Artificial Sequence: Synthetic primer
acctgccatcatgagtgcat

SEQ ID NO: 96 - DNA, 20 bp, Artificial Sequence
  Description of Artificial Sequence: Synthetic primer
ccctacaagaaggctacatc

SEQ ID NO: 97 - DNA, 20 bp, Artificial Sequence
  Description of Artificial Sequence: Synthetic primer
caaggcatgcatgctccttc

SEQ ID NO: 98 - DNA, 20 bp, Artificial Sequence
  Description of Artificial Sequence: Synthetic primer
gcaaggaagactgattcgtg

SEQ ID NO: 99 - DNA, 20 bp, Artificial Sequence
  Description of Artificial Sequence: Synthetic primer
tgtctccccataaccaacac

SEQ ID NO: 100 - DNA, 20 bp, Artificial Sequence
  Description of Artificial Sequence: Synthetic primer
gagctgagtgattcttgtcc

SEQ ID NO: 101 - DNA, 20 bp, Artificial Sequence
  Description of Artificial Sequence: Synthetic primer
aaggaaggaagtgagggatg

SEQ ID NO: 102 - DNA, 20 bp, Artificial Sequence
  Description of Artificial Sequence: Synthetic primer
cactgtttacaatagccaag

SEQ ID NO: 103 - DNA, 20 bp, Artificial Sequence
  Description of Artificial Sequence: Synthetic primer
gcagctgagcaaagatatgg

SEQ ID NO: 104 - DNA, 20 bp, Artificial Sequence
  Description of Artificial Sequence: Synthetic primer
ctccttccttctgctatctc

SEQ ID NO: 105 - DNA, 20 bp, Artificial Sequence
  Description of Artificial Sequence: Synthetic primer
cgtctgctgggacactgaaa

SEQ ID NO: 106 - DNA, 20 bp, Artificial Sequence
  Description of Artificial Sequence: Synthetic primer
ttaagtcctttaccaaaggg

SEQ ID NO: 107 - DNA, 20 bp, Artificial Sequence
  Description of Artificial Sequence: Synthetic primer
gccctatttacgtggatttg

SEQ ID NO: 108 - DNA, 20 bp, Artificial Sequence
  Description of Artificial Sequence: Synthetic primer
catcaagactccatggagag

SEQ ID NO: 109 - DNA, 20 bp, Artificial Sequence
  Description of Artificial Sequence: Synthetic primer
ccctagaaactcccttatcc

SEQ ID NO: 110 - DNA, 20 bp, Artificial Sequence
  Description of Artificial Sequence: Synthetic primer
agctcaactccccccaagtt

SEQ ID NO: 111 - DNA, 20 bp, Artificial Sequence
  Description of Artificial Sequence: Synthetic primer
aagtgagaacaggcttcctg

SEQ ID NO: 112 - DNA, 20 bp, Artificial Sequence
  Description of Artificial Sequence: Synthetic primer
tctaacctggaacccctcag

SEQ ID NO: 113 - DNA, 20 bp, Artificial Sequence
  Description of Artificial Sequence: Synthetic primer
caaagtgtcaggcttcatgg

SEQ ID NO: 114 - DNA, 20 bp, Artificial Sequence
  Description of Artificial Sequence: Synthetic primer
tcccgacttgtacaccttgg

SEQ ID NO: 115 - DNA, 19 bp, Artificial Sequence
  Description of Artificial Sequence: Synthetic primer
agtcttgcagtccaggatg

SEQ ID NO: 116 - DNA, 20 bp, Artificial Sequence
  Description of Artificial Sequence: Synthetic primer
tcttgcagtccaggatgcag

SEQ ID NO: 117 - DNA, 19 bp, Artificial Sequence
  Description of Artificial Sequence: Synthetic primer
tttccagtccctgcatgtg

SEQ ID NO: 118 - DNA, 20 bp, Artificial Sequence
  Description of Artificial Sequence: Synthetic primer
aaaggttctgggtaacccct

SEQ ID NO: 119 - DNA, 20 bp, Artificial Sequence
  Description of Artificial Sequence: Synthetic primer
cctctttctgtaatatctgg

SEQ ID NO: 120 - DNA, 20 bp, Artificial Sequence
  Description of Artificial Sequence: Synthetic primer
ctgcaatagtacacgtggtg

SEQ ID NO: 121 - DNA, 20 bp, Artificial Sequence
  Description of Artificial Sequence: Synthetic primer
tacacttgcccaaagtccac

SEQ ID NO: 122 - DNA, 20 bp, Artificial Sequence
  Description of Artificial Sequence: Synthetic primer
actgcttaggttggcaaagg

SEQ ID NO: 123 - DNA, 20 bp, Artificial Sequence
  Description of Artificial Sequence: Synthetic primer
aaaataattcaaaaccactg

SEQ ID NO: 124 - DNA, 20 bp, Artificial Sequence
  Description of Artificial Sequence: Synthetic primer
ggtgaaatgctgacctgtgt

SEQ ID NO: 125 - DNA, 20 bp, Artificial Sequence
  Description of Artificial Sequence: Synthetic primer
catttcatttccctgcactg

SEQ ID NO: 126 - DNA, 20 bp, Artificial Sequence
  Description of Artificial Sequence: Synthetic primer
gggttgagtatgaacaaatg

SEQ ID NO: 127 - DNA, 20 bp, Artificial Sequence
  Description of Artificial Sequence: Synthetic primer
tcccgggaattgaagggaat

SEQ ID NO: 128 - DNA, 20 bp, Artificial Sequence
  Description of Artificial Sequence: Synthetic primer
gggtagagtgtaaatgacag

SEQ ID NO: 129 - DNA, 20 bp, Artificial Sequence
  Description of Artificial Sequence: Synthetic primer
catactgaggcatggaacag

SEQ ID NO: 130 - DNA, 20 bp, Artificial Sequence
  Description of Artificial Sequence: Synthetic primer
tgctcctggcagcaaatatc

SEQ ID NO: 131 - DNA, 21 bp, Artificial Sequence
  Description of Artificial Sequence: Synthetic primer
ccccttagtttaaagtaaagc

SEQ ID NO: 132 - DNA, 20 bp, Artificial Sequence
  Description of Artificial Sequence: Synthetic primer
ctagacagtcaacaactgag

SEQ ID NO: 133 - DNA, 20 bp, Artificial Sequence
  Description of Artificial Sequence: Synthetic primer
gtgccggtaagaatgatcag

SEQ ID NO: 134 - DNA, 20 bp, Artificial Sequence
  Description of Artificial Sequence: Synthetic primer
gggacatggcagaaattcag

SEQ ID NO: 135 - DNA, 20 bp, Artificial Sequence
  Description of Artificial Sequence: Synthetic primer
cctcttgggtcttgtagtcg

SEQ ID NO: 136 - DNA, 20 bp, Artificial Sequence
  Description of Artificial Sequence: Synthetic primer
tttctggacctgactgggtg

SEQ ID NO: 137 - DNA, 20 bp, Artificial Sequence
  Description of Artificial Sequence: Synthetic primer
agggaagattccagtaaagc

SEQ ID NO: 138 - DNA, 20 bp, Artificial Sequence
  Description of Artificial Sequence: Synthetic primer
gggtttctcaaagggctaag

SEQ ID NO: 139 - DNA, 20 bp, Artificial Sequence
  Description of Artificial Sequence: Synthetic primer
cacaccaaaagaactgcatg

SEQ ID NO: 140 - DNA, 20 bp, Artificial Sequence
  Description of Artificial Sequence: Synthetic primer
aaaagcagctgtgacctaag

SEQ ID NO: 141 - DNA, 20 bp, Artificial Sequence
  Description of Artificial Sequence: Synthetic primer
ttcctctctctgggcttatc

SEQ ID NO: 142 - DNA, 21 bp, Artificial Sequence
  Description of Artificial Sequence: Synthetic primer
tgggttgtcacagcaaggtgg

SEQ ID NO: 143 - DNA, 20 bp, Artificial Sequence
  Description of Artificial Sequence: Synthetic primer
agggtggagaatctacagaa

SEQ ID NO: 144 - DNA, 20 bp, Artificial Sequence
  Description of Artificial Sequence: Synthetic primer
catcagacagatcccaacag

SEQ ID NO: 145 - DNA, 20 bp, Artificial Sequence
  Description of Artificial Sequence: Synthetic primer
agctttggtattggagcagg

SEQ ID NO: 146 - DNA, 20 bp, Artificial Sequence
  Description of Artificial Sequence: Synthetic primer
aagaacttgaccttgaaggc

SEQ ID NO: 147 - DNA, 20 bp, Artificial Sequence
  Description of Artificial Sequence: Synthetic primer
tcgccttcaaggtcaagttc

SEQ ID NO: 148 - DNA, 20 bp, Artificial Sequence
  Description of Artificial Sequence: Synthetic primer
gccaggtatagggatttgtg

SEQ ID NO: 149 - DNA, 20 bp, Artificial Sequence
  Description of Artificial Sequence: Synthetic primer
agagcctgacaccttcccta

SEQ ID NO: 150 - DNA, 21 bp, Artificial Sequence
  Description of Artificial Sequence: Synthetic primer
gaaaaaaatatatgataaagg

SEQ ID NO: 151 - DNA, 20 bp, Artificial Sequence
  Description of Artificial Sequence: Synthetic primer
aattaattctcccctatagc

SEQ ID NO: 152 - DNA, 20 bp, Artificial Sequence
  Description of Artificial Sequence: Synthetic primer
tatcagatggtatccacatg

SEQ ID NO: 153 - DNA, 20 bp, Artificial Sequence
  Description of Artificial Sequence: Synthetic primer
cacaagcatgccctgtgtgg

SEQ ID NO: 154 - DNA, 20 bp, Artificial Sequence
  Description of Artificial Sequence: Synthetic primer
atgaacggtgcctggtacac

SEQ ID NO: 155 - DNA, 21 bp, Artificial Sequence
  Description of Artificial Sequence: Synthetic primer
atgcagacagaaacgcactca

SEQ ID NO: 156 - DNA, 20 bp, Artificial Sequence
  Description of Artificial Sequence: Synthetic primer
catcatggccgattttgtcc

SEQ ID NO: 157 - DNA, 20 bp, Artificial Sequence
  Description of Artificial Sequence: Synthetic primer
tactttggcaaatctctgcc

SEQ ID NO: 158 - DNA, 20 bp, Artificial Sequence
  Description of Artificial Sequence: Synthetic primer
gggtccaaagcttttgtcag

SEQ ID NO: 159 - DNA, 21 bp, Artificial Sequence
  Description of Artificial Sequence: Synthetic primer
ccctccattctgtaccactta

SEQ ID NO: 160 - DNA, 20 bp, Artificial Sequence
  Description of Artificial Sequence: Synthetic primer
ttgaactcgtctcccatcag

SEQ ID NO: 161 - DNA, 20 bp, Artificial Sequence
  Description of Artificial Sequence: Synthetic primer
tgatgggagacgagttcaag

SEQ ID NO: 162 - DNA, 20 bp, Artificial Sequence
  Description of Artificial Sequence: Synthetic primer
acccctgtctctacaaaaat

SEQ ID NO: 163 - DNA, 20 bp, Artificial Sequence
  Description of Artificial Sequence: Synthetic primer
cattccctgctccatttccc

SEQ ID NO: 164 - DNA, 20 bp, Artificial Sequence
  Description of Artificial Sequence: Synthetic primer
ggccgttctcctgttctaac

SEQ ID NO: 165 - DNA, 20 bp, Artificial Sequence
  Description of Artificial Sequence: Synthetic primer
tcttcccttctgaactcagg

SEQ ID NO: 166 - DNA, 20 bp, Artificial Sequence
  Description of Artificial Sequence: Synthetic primer
gcctgcccaatattgtgagt

SEQ ID NO: 167 - DNA, 20 bp, Artificial Sequence
  Description of Artificial Sequence: Synthetic primer
caaaggaacaggactcagac

SEQ ID NO: 168 - DNA, 20 bp, Artificial Sequence
  Description of Artificial Sequence: Synthetic primer
ccggccctttctttcttttg

SEQ ID NO: 169 - DNA, 20 bp, Artificial Sequence
  Description of Artificial Sequence: Synthetic primer
tgactaggtcaggtcccctc

SEQ ID NO: 170 - DNA, 20 bp, Artificial Sequence
  Description of Artificial Sequence: Synthetic primer
gctgtgcaaattaggactct

SEQ ID NO: 171 - DNA, 20 bp, Artificial Sequence
  Description of Artificial Sequence: Synthetic primer
atcttgggcatcttgaggca

SEQ ID NO: 172 - DNA, 20 bp, Artificial Sequence
  Description of Artificial Sequence: Synthetic primer
ccaagaggcttaagaagagc

SEQ ID NO: 173 - DNA, 20 bp, Artificial Sequence
  Description of Artificial Sequence: Synthetic primer
acgaagattctatctaggca

SEQ ID NO: 174 - DNA, 19 bp, Artificial Sequence
  Description of Artificial Sequence: Synthetic primer
tgactgcaggaagctctgg

SEQ ID NO: 175 - DNA, 20 bp, Artificial Sequence
  Description of Artificial Sequence: Synthetic primer
taatattctgcaggtaaacc

SEQ ID NO: 176 - DNA, 20 bp, Artificial Sequence
  Description of Artificial Sequence: Synthetic primer
aagggaggggcagtaggaga

SEQ ID NO: 177 - DNA, 18 bp, Artificial Sequence
  Description of Artificial Sequence: Synthetic primer
agggaggagttgggagcc

SEQ ID NO: 178 - DNA, 20 bp, Artificial Sequence
  Description of Artificial Sequence: Synthetic primer
ccactggcattaaagtgctg

SEQ ID NO: 179 - DNA, 20 bp, Artificial Sequence
  Description of Artificial Sequence: Synthetic primer
agtccttcttctgtggctgg

SEQ ID NO: 180 - DNA, 20 bp, Artificial Sequence
  Description of Artificial Sequence: Synthetic primer
agagcttctaggcttggatg

SEQ ID NO: 181 - DNA, 20 bp, Artificial Sequence
  Description of Artificial Sequence: Synthetic primer
aaggagaggagggactggag

SEQ ID NO: 182 - DNA, 20 bp, Artificial Sequence
  Description of Artificial Sequence: Synthetic primer
caattacggaagttacactg

SEQ ID NO: 183 - DNA, 20 bp, Artificial Sequence
  Description of Artificial Sequence: Synthetic primer
agatcctggagcctcattgt

SEQ ID NO: 184 - DNA, 19 bp, Artificial Sequence
  Description of Artificial Sequence: Synthetic primer
aagagggtatgtgtgttgg

SEQ ID NO: 185 - DNA, 20 bp, Artificial Sequence
  Description of Artificial Sequence: Synthetic primer
gctcacatccttagattgcc

SEQ ID NO: 186 - DNA, 20 bp, Artificial Sequence
  Description of Artificial Sequence: Synthetic primer
tatctttccaaatgttttac

SEQ ID NO: 187 - DNA, 20 bp, Artificial Sequence
  Description of Artificial Sequence: Synthetic primer
tagagcagggcctggtgtgt

SEQ ID NO: 188 - DNA, 20 bp, Artificial Sequence
  Description of Artificial Sequence: Synthetic primer
agtgactgcagtgaagaagg

SEQ ID NO: 189 - DNA, 20 bp, Artificial Sequence
  Description of Artificial Sequence: Synthetic primer
atcgccagaccctcaagaac

SEQ ID NO: 190 - DNA, 20 bp, Artificial Sequence
  Description of Artificial Sequence: Synthetic primer
agcctcaagtcactgatgtc

SEQ ID NO: 191 - DNA, 20 bp, Artificial Sequence
  Description of Artificial Sequence: Synthetic primer
aagaaacagctcccagtctg

SEQ ID NO: 192 - DNA, 20 bp, Artificial Sequence
  Description of Artificial Sequence: Synthetic primer
aatatggtcaacttggtggc

SEQ ID NO: 193 - DNA, 20 bp, Artificial Sequence
  Description of Artificial Sequence: Synthetic primer
ggaaagcaaaggaatggcag

SEQ ID NO: 194 - DNA, 20 bp, Artificial Sequence
  Description of Artificial Sequence: Synthetic primer
tggaattacaggcgtgagct

SEQ ID NO: 195 - DNA, 20 bp, Artificial Sequence
  Description of Artificial Sequence: Synthetic primer
tggacctcttctatcatcac

SEQ ID NO: 196 - DNA, 20 bp, Artificial Sequence
  Description of Artificial Sequence: Synthetic primer
accaagattcaggcactgag

SEQ ID NO: 197 - DNA, 20 bp, Artificial Sequence
  Description of Artificial Sequence: Synthetic primer
gcacctggaagatttatggg

SEQ ID NO: 198 - DNA, 20 bp, Artificial Sequence
  Description of Artificial Sequence: Synthetic primer
tgaatgtggctttaccaagg

SEQ ID NO: 199 - DNA, 20 bp, Artificial Sequence
  Description of Artificial Sequence: Synthetic primer
gctctgattgtgtctctgtg

SEQ ID NO: 200 - DNA, 20 bp, Artificial Sequence
  Description of Artificial Sequence: Synthetic primer
agtcaagaaccagtccctac

SEQ ID NO: 201 - DNA, 20 bp, Artificial Sequence
  Description of Artificial Sequence: Synthetic primer
tgagtggggtacagatgaac

SEQ ID NO: 202 - DNA, 20 bp, Artificial Sequence
  Description of Artificial Sequence: Synthetic primer
gaagataggtgagttgaggg

SEQ ID NO: 203 - DNA, 20 bp, Artificial Sequence
  Description of Artificial Sequence: Synthetic primer
tcaaggctttagcttgtccc

SEQ ID NO: 204 - DNA, 20 bp, Artificial Sequence
  Description of Artificial Sequence: Synthetic primer
atgaagcctgacactttggg

SEQ ID NO: 205 - DNA, 20 bp, Artificial Sequence
  Description of Artificial Sequence: Synthetic primer
agctgtgggtgagtgtcaag

SEQ ID NO: 206 - DNA, 20 bp, Artificial Sequence
  Description of Artificial Sequence: Synthetic primer
agaaaatcagccaaaggctc

SEQ ID NO: 207 - DNA, 20 bp, Artificial Sequence
  Description of Artificial Sequence: Synthetic primer
ttccctgatggacagatggc

SEQ ID NO: 208 - DNA, 20 bp, Artificial Sequence
  Description of Artificial Sequence: Synthetic primer
ggccatttagtgcttggagc

SEQ ID NO: 209 - DNA, 20 bp, Artificial Sequence
  Description of Artificial Sequence: Synthetic primer
gaggggttacccagaacctt

SEQ ID NO: 210 - DNA, 20 bp, Artificial Sequence
  Description of Artificial Sequence: Synthetic primer
caggcctgaaaaagcaaagg

SEQ ID NO: 211 - DNA, 20 bp, Artificial Sequence
  Description of Artificial Sequence: Synthetic primer
ctgggcattgcagaactgaa

SEQ ID NO: 212 - DNA, 20 bp, Artificial Sequence
  Description of Artificial Sequence: Synthetic primer
agatgttgcaaaggaggtgc

SEQ ID NO: 213 - DNA, 20 bp, Artificial Sequence
  Description of Artificial Sequence: Synthetic primer
tctctctgtcaatcatgggc

SEQ ID NO: 214 - DNA, 20 bp, Artificial Sequence
  Description of Artificial Sequence: Synthetic primer
atgcttccttccacagggac

SEQ ID NO: 215 - DNA, 18 bp, Artificial Sequence
  Description of Artificial Sequence: Synthetic primer
tcaaccaatagaaaaggc

SEQ ID NO: 216 - DNA, 18 bp, Artificial Sequence
  Description of Artificial Sequence: Synthetic primer
aacctctggtcctctgga

SEQ ID NO: 217 - DNA, 18 bp, Artificial Sequence
  Description of Artificial Sequence: Synthetic primer
taagccttggtatgatac

SEQ ID NO: 218 - DNA, 19 bp, Artificial Sequence
  Description of Artificial Sequence: Synthetic primer
gccgtaaattccattcttc

SEQ ID NO: 219 - DNA, 19 bp, Artificial Sequence
  Description of Artificial Sequence: Synthetic primer
ctgaactttacaggtaaca

SEQ ID NO: 220 - DNA, 24 bp, Artificial Sequence
  Description of Artificial Sequence: Synthetic primer
aaactatgtatcagacaaaagcac

SEQ ID NO: 221 - DNA, 18 bp, Artificial Sequence
  Description of Artificial Sequence: Synthetic primer
cctggaaggcagctgtgg

SEQ ID NO: 222 - DNA, 18 bp, Artificial Sequence
  Description of Artificial Sequence: Synthetic primer
cagcctgggtgacagagc

SEQ ID NO: 223 - DNA, 21 bp, Artificial Sequence
  Description of Artificial Sequence: Synthetic primer
gacttttctaggaaagactta

SEQ ID NO: 224 - DNA, 17 bp, Artificial Sequence
  Description of Artificial Sequence: Synthetic primer
taccggcacaaacagtc

SEQ ID NO: 225 - DNA, 20 bp, Artificial Sequence
  Description of Artificial Sequence: Synthetic primer
cccatctcaaaaacaaaaac

SEQ ID NO: 226 - DNA, 17 bp, Artificial Sequence
  Description of Artificial Sequence: Synthetic primer
ggtgtgtggcccatgat

SEQ ID NO: 227 - DNA, 20 bp, Artificial Sequence
  Description of Artificial Sequence: Synthetic primer
catcacacctgtctgccatc

SEQ ID NO: 228 - DNA, 21 bp, Artificial Sequence
  Description of Artificial Sequence: Synthetic primer
ctccatgattggagactgaca

SEQ ID NO: 229 - DNA, 17 bp, Artificial Sequence
  Description of Artificial Sequence: Synthetic primer
ctactggcagggaacat

SEQ ID NO: 230 - DNA, 17 bp, Artificial Sequence
  Description of Artificial Sequence: Synthetic primer
ttacaggcgtaagccac

SEQ ID NO: 231 - DNA, 22 bp, Artificial Sequence
  Description of Artificial Sequence: Synthetic primer
cttaaaatctactcccatacat

SEQ ID NO: 232 - DNA, 17 bp, Artificial Sequence
  Description of Artificial Sequence: Synthetic primer
caaaagagttaggggag

SEQ ID NO: 233 - DNA, 17 bp, Artificial Sequence
  Description of Artificial Sequence: Synthetic primer
catgccaaaatctcgcc

SEQ ID NO: 234 - DNA, 17 bp, Artificial Sequence
  Description of Artificial Sequence: Synthetic primer
ttggggccccatgtaaa

SEQ ID NO: 235 - DNA, 17 bp, Artificial Sequence
  Description of Artificial Sequence: Synthetic primer
cttctgtgcaggagaat

SEQ ID NO: 236 - DNA, 17 bp, Artificial Sequence
  Description of Artificial Sequence: Synthetic primer
ttgaggagcagtggtca

SEQ ID NO: 237 - DNA, 17 bp, Artificial Sequence
  Description of Artificial Sequence: Synthetic primer
gggtcctgccctagtcc

SEQ ID NO: 238 - DNA, 17 bp, Artificial Sequence
  Description of Artificial Sequence: Synthetic primer
gagggagatgggctgag

SEQ ID NO: 239 - DNA, 20 bp, Artificial Sequence
  Description of Artificial Sequence: Synthetic primer
caatgcagctaggaccttct

SEQ ID NO: 240 - DNA, 24 bp, Artificial Sequence
  Description of Artificial Sequence: Synthetic primer
ctggctcagatctgaaccctaact

SEQ ID NO: 241 - DNA, 20 bp, Artificial Sequence
  Description of Artificial Sequence: Synthetic primer
ggctgttggagaggttgata

SEQ ID NO: 242 - DNA, 19 bp, Artificial Sequence
  Description of Artificial Sequence: Synthetic primer
caggtgcttttacaaacaa

SEQ ID NO: 243 - DNA, 17 bp, Artificial Sequence
  Description of Artificial Sequence: Synthetic primer
gtccaccatggccctcc

SEQ ID NO: 244 - DNA, 17 bp, Artificial Sequence
  Description of Artificial Sequence: Synthetic primer
ctgggaagtttgcaggg

SEQ ID NO: 245 - DNA, 17 bp, Artificial Sequence
  Description of Artificial Sequence: Synthetic primer
agtgtgtccacggctcc

SEQ ID NO: 246 - DNA, 17 bp, Artificial Sequence
  Description of Artificial Sequence: Synthetic primer
cctgtgcatccatggag

SEQ ID NO: 247 - DNA, 18 bp, Artificial Sequence
  Description of Artificial Sequence: Synthetic primer
catctctaacatcatggc

SEQ ID NO: 248 - DNA, 20 bp, Artificial Sequence
  Description of Artificial Sequence: Synthetic primer
tgaggcatgcagacagaaac

SEQ ID NO: 249 - DNA, 20 bp, Artificial Sequence
  Description of Artificial Sequence: Synthetic primer
caacgccacacagcttgtga

SEQ ID NO: 250 - DNA, 18 bp, Artificial Sequence
  Description of Artificial Sequence: Synthetic primer
cagtggattgtggccccc

SEQ ID NO: 251 - DNA, 17 bp, Artificial Sequence
  Description of Artificial Sequence: Synthetic primer
agcccgttggcctgaac

SEQ ID NO: 252 - DNA, 18 bp, Artificial Sequence
  Description of Artificial Sequence: Synthetic primer
gttctctgagcgagtctt

SEQ ID NO: 253 - DNA, 21 bp, Artificial Sequence
  Description of Artificial Sequence: Synthetic primer
cataccacatgccatctggat

SEQ ID NO: 254 - DNA, 18 bp, Artificial Sequence
  Description of Artificial Sequence: Synthetic primer
gggactataggtatgcac

SEQ ID NO: 255 - DNA, 19 bp, Artificial Sequence
  Description of Artificial Sequence: Synthetic primer
ttccagccccctacaagtc

SEQ ID NO: 256 - DNA, 17 bp, Artificial Sequence
  Description of Artificial Sequence: Synthetic primer
cagaagggaagagggac

SEQ ID NO: 257 - DNA, 17 bp, Artificial Sequence
  Description of Artificial Sequence: Synthetic primer
tatgtgcaaggagagag

SEQ ID NO: 258 - DNA, 17 bp, Artificial Sequence
  Description of Artificial Sequence: Synthetic primer
ctgtgatgcctctctcc

SEQ ID NO: 259 - DNA, 18 bp, Artificial Sequence
  Description of Artificial Sequence: Synthetic primer
ggcaggcccctgaccggc

SEQ ID NO: 260 - DNA, 17 bp, Artificial Sequence
  Description of Artificial Sequence: Synthetic primer
ccaagaaaccactgaac

SEQ ID NO: 261 - DNA, 22 bp, Artificial Sequence
  Description of Artificial Sequence: Synthetic primer
agtatttaaaggagagacacac

SEQ ID NO: 262 - DNA, 17 bp, Artificial Sequence
  Description of Artificial Sequence: Synthetic primer
gatgagaaactgaggcc

SEQ ID NO: 263 - DNA, 17 bp, Artificial Sequence
  Description of Artificial Sequence: Synthetic primer
ttccacaggttgtcggc

SEQ ID NO: 264 - DNA, 20 bp, Artificial Sequence
  Description of Artificial Sequence: Synthetic primer
atatcgtgactaccgtccag

SEQ ID NO: 265 - DNA, 17 bp, Artificial Sequence
  Description of Artificial Sequence: Synthetic primer
gaaatgtggcccctttc

SEQ ID NO: 266 - DNA, 18 bp, Artificial Sequence
  Description of Artificial Sequence: Synthetic primer
cagagcagctccgagtcc

SEQ ID NO: 267 - DNA, 17 bp, Artificial Sequence
  Description of Artificial Sequence: Synthetic primer
cctctccctgctggtgg

SEQ ID NO: 268 - DNA, 18 bp, Artificial Sequence
  Description of Artificial Sequence: Synthetic primer
tgggagtcagcccagctc

SEQ ID NO: 269 - DNA, 18 bp, Artificial Sequence
  Description of Artificial Sequence: Synthetic primer
cctggtgtctcctccagc

SEQ ID NO: 270 - DNA, 19 bp, Artificial Sequence
  Description of Artificial Sequence: Synthetic primer
gccacagaagaaggactcc

SEQ ID NO: 271 - DNA, 19 bp, Artificial Sequence
  Description of Artificial Sequence: Synthetic primer
tgagacaatcccttccccc

SEQ ID NO: 272 - DNA, 21 bp, Artificial Sequence
  Description of Artificial Sequence: Synthetic primer
taccaaaatgggactgacctc

SEQ ID NO: 273 - DNA, 19 bp, Artificial Sequence
  Description of Artificial Sequence: Synthetic primer
tttgaggatggcccctgac

SEQ ID NO: 274 - DNA, 22 bp, Artificial Sequence
  Description of Artificial Sequence: Synthetic primer
taggccaaaaagtctaaattgc

SEQ ID NO: 275 - DNA, 20 bp, Artificial Sequence
  Description of Artificial Sequence: Synthetic primer
ccttagagaaacggaaggtg

SEQ ID NO: 276 - DNA, 19 bp, Artificial Sequence
  Description of Artificial Sequence: Synthetic primer
actttattcctggatcaga

SEQ ID NO: 277 - DNA, 17 bp, Artificial Sequence
  Description of Artificial Sequence: Synthetic primer
caggcaagctaatgcaa

SEQ ID NO: 278 - DNA, 19 bp, Artificial Sequence
  Description of Artificial Sequence: Synthetic primer
tggaattatgcgttaaagg

SEQ ID NO: 279 - DNA, 17 bp, Artificial Sequence
  Description of Artificial Sequence: Synthetic primer
tgcattcagcttctcca

SEQ ID NO: 280 - DNA, 19 bp, Artificial Sequence
  Description of Artificial Sequence: Synthetic primer
ctacatctgcctctctatc

SEQ ID NO: 281 - DNA, 17 bp, Artificial Sequence
  Description of Artificial Sequence: Synthetic primer
gagggacagaagggacc

SEQ ID NO: 282 - DNA, 21 bp, Artificial Sequence
  Description of Artificial Sequence: Synthetic primer
cttacttgtgtggtttagaat

SEQ ID NO: 283 - DNA, 20 bp, Artificial Sequence
  Description of Artificial Sequence: Synthetic primer
cccataaccaacactcagct

SEQ ID NO: 284 - DNA, 20 bp, Artificial Sequence
  Description of Artificial Sequence: Synthetic primer
gattcttgtcctctgagagc

SEQ ID NO: 285 - DNA, 18 bp, Artificial Sequence
  Description of Artificial Sequence: Synthetic primer
gaggacaggagtggagcc

SEQ ID NO: 286 - DNA, 17 bp, Artificial Sequence
  Description of Artificial Sequence: Synthetic primer
acagagaaaatgtggca

SEQ ID NO: 287 - DNA, 19 bp, Artificial Sequence
  Description of Artificial Sequence: Synthetic primer
gatatggtttcaaaagcct

SEQ ID NO: 288 - DNA, 20 bp, Artificial Sequence
  Description of Artificial Sequence: Synthetic primer
tgccattctctaggcccgtc

SEQ ID NO: 289 - DNA, 19 bp, Artificial Sequence
  Description of Artificial Sequence: Synthetic primer
tgggacactgaaaccaggg

SEQ ID NO: 290 - DNA, 17 bp, Artificial Sequence
  Description of Artificial Sequence: Synthetic primer
accaaagggattgactt

SEQ ID NO: 291 - DNA, 19 bp, Artificial Sequence
  Description of Artificial Sequence: Synthetic primer
gaactctgagttacattcc

SEQ ID NO: 292 - DNA, 21 bp, Artificial Sequence
  Description of Artificial Sequence: Synthetic primer
cttccctgcctattttatgtc

SEQ ID NO: 293 - DNA, 20 bp, Artificial Sequence
  Description of Artificial Sequence: Synthetic primer
cttatcccccaactcacctt

SEQ ID NO: 294 - DNA, 17 bp, Artificial Sequence
  Description of Artificial Sequence: Synthetic primer
tcatctgcccccagttt

SEQ ID NO: 295 - DNA, 22 bp, Artificial Sequence
  Description of Artificial Sequence: Synthetic primer
aggggttccaggttagaccctt

SEQ ID NO: 296 - DNA, 21 bp, Artificial Sequence
  Description of Artificial Sequence: Synthetic primer
aggaagcctgttctcactttc

SEQ ID NO: 297 - DNA, 17 bp, Artificial Sequence
  Description of Artificial Sequence: Synthetic primer
tcatggggaagccctaa

SEQ ID NO: 298 - DNA, 21 bp, Artificial Sequence
  Description of Artificial Sequence: Synthetic primer
cttgtacaccttggacttgac

SEQ ID NO: 299 - DNA, 17 bp, Artificial Sequence
  Description of Artificial Sequence: Synthetic primer
caacagccagcagcccc

SEQ ID NO: 300 - DNA, 18 bp, Artificial Sequence
  Description of Artificial Sequence: Synthetic primer
gatgcaggaagcagggcc

SEQ ID NO: 301 - DNA, 19 bp, Artificial Sequence
  Description of Artificial Sequence: Synthetic primer
cacctgtctgtggactgga

SEQ ID NO: 302 - DNA, 19 bp, Artificial Sequence
  Description of Artificial Sequence: Synthetic primer
gggtaacccctcagcccag

SEQ ID NO: 303 - DNA, 17 bp, Artificial Sequence
  Description of Artificial Sequence: Synthetic primer
tctggatccccagtgcc

SEQ ID NO: 304 - DNA, 20 bp, Artificial Sequence
  Description of Artificial Sequence: Synthetic primer
tagtacacgtggtgtaaggg

SEQ ID NO: 305 - DNA, 19 bp, Artificial Sequence
  Description of Artificial Sequence: Synthetic primer
ccaaagtccaccagcctct

SEQ ID NO: 306 - DNA, 23 bp, Artificial Sequence
  Description of Artificial Sequence: Synthetic primer
caaaggattttaacttcctctag

SEQ ID NO: 307 - DNA, 20 bp, Artificial Sequence
  Description of Artificial Sequence: Synthetic primer
ctctgctcagagcatagatg

SEQ ID NO: 308 - DNA, 21 bp, Artificial Sequence
  Description of Artificial Sequence: Synthetic primer
gtaggtcaataaaagaggagg

SEQ ID NO: 309 - DNA, 21 bp, Artificial Sequence
  Description of Artificial Sequence: Synthetic primer
gttcaagagtttgatgtcaag

SEQ ID NO: 310 - DNA, 20 bp, Artificial Sequence
  Description of Artificial Sequence: Synthetic primer
tgtatctgggacataccatc

SEQ ID NO: 311 - DNA, 20 bp, Artificial Sequence
  Description of Artificial Sequence: Synthetic primer
aaagcatagtttctcttcag

SEQ ID NO: 312 - DNA, 20 bp, Artificial Sequence
  Description of Artificial Sequence: Synthetic primer
gctgtgatttttggtgagtc

SEQ ID NO: 313 - DNA, 20 bp, Artificial Sequence
  Description of Artificial Sequence: Synthetic primer
ttgtcctttctcattgccac

SEQ ID NO: 314 - DNA, 20 bp, Artificial Sequence
  Description of Artificial Sequence: Synthetic primer
aggtaaatgggcatacagtg

SEQ ID NO: 315 - DNA, 20 bp, Artificial Sequence
  Description of Artificial Sequence: Synthetic primer
agggaattggcccaatttgc

SEQ ID NO: 316 - DNA, 20 bp, Artificial Sequence
  Description of Artificial Sequence: Synthetic primer
cccaggttcaagtgattctc

SEQ ID NO: 317 - DNA, 21 bp, Artificial Sequence
  Description of Artificial Sequence: Synthetic primer
ccagaccaaacgtttcaataa

SEQ ID NO: 318 - DNA, 20 bp, Artificial Sequence
  Description of Artificial Sequence: Synthetic primer
gtcagaatgctgacatgtag

SEQ ID NO: 319 - DNA, 20 bp, Artificial Sequence
  Description of Artificial Sequence: Synthetic primer
atgggacaattgcaaacagg

SEQ ID NO: 320 - DNA, 20 bp, Artificial Sequence
  Description of Artificial Sequence: Synthetic primer
taaatacaagaagccctagg

SEQ ID NO: 321 - DNA, 20 bp, Artificial Sequence
  Description of Artificial Sequence: Synthetic primer
gttagaaggctagagagaac

SEQ ID NO: 322 - DNA, 20 bp, Artificial Sequence
  Description of Artificial Sequence: Synthetic primer
agtcaggatactctttaggg

SEQ ID NO: 323 - DNA, 20 bp, Artificial Sequence
  Description of Artificial Sequence: Synthetic primer
gggtctctatggaacaaaag

SEQ ID NO: 324 - DNA, 20 bp, Artificial Sequence
  Description of Artificial Sequence: Synthetic primer
tgcttggtgtgtctaactag

SEQ ID NO: 325 - DNA, 20 bp, Artificial Sequence
  Description of Artificial Sequence: Synthetic primer
atcaagaacaggatactgcg

SEQ ID NO: 326 - DNA, 21 bp, Artificial Sequence
  Description of Artificial Sequence: Synthetic primer
cccctatctttttgttggatg

SEQ ID NO: 327 - DNA, 20 bp, Artificial Sequence
  Description of Artificial Sequence: Synthetic primer
ttcactgttcagattgctgg

SEQ ID NO: 328 - DNA, 20 bp, Artificial Sequence
  Description of Artificial Sequence: Synthetic primer
tgctatcttccatggaagaa

SEQ ID NO: 329 - DNA, 20 bp, Artificial Sequence
  Description of Artificial Sequence: Synthetic primer
gacgctaagcatcattagtc

SEQ ID NO: 330 - DNA, 20 bp, Artificial Sequence
  Description of Artificial Sequence: Synthetic primer
tttttacgtctgtgtgaacc

SEQ ID NO: 331 - DNA, 20 bp, Artificial Sequence
  Description of Artificial Sequence: Synthetic primer
attttagtgcacccatcacc

SEQ ID NO: 332 - DNA, 21 bp, Artificial Sequence
  Description of Artificial Sequence: Synthetic primer
gagttaaacatcagtcgttgt

SEQ ID NO: 333 - DNA, 21 bp, Artificial Sequence
  Description of Artificial Sequence: Synthetic primer
cgtttaagatgatagatcttc

SEQ ID NO: 334 - DNA, 20 bp, Artificial Sequence
  Description of Artificial Sequence: Synthetic primer
acatggatggaaaggaagac

SEQ ID NO: 335 - DNA, 20 bp, Artificial Sequence
  Description of Artificial Sequence: Synthetic primer
tatcaacaagccaagatccc

SEQ ID NO: 336 - DNA, 20 bp, Artificial Sequence
  Description of Artificial Sequence: Synthetic primer
ggctgagtgttaagtattcc

SEQ ID NO: 337 - DNA, 20 bp, Artificial Sequence
  Description of Artificial Sequence: Synthetic primer
gaaatgttctgtcttcaggc

SEQ ID NO: 338 - DNA, 20 bp, Artificial Sequence
  Description of Artificial Sequence: Synthetic primer
tacatgttgagatcccagac

SEQ ID NO: 339 - DNA, 20 bp, Artificial Sequence
  Description of Artificial Sequence: Synthetic primer
aaattgtgtttcttgtaagc

SEQ ID NO: 340 - DNA, 20 bp, Artificial Sequence
  Description of Artificial Sequence: Synthetic primer
atctgaaactctttgagcgc

SEQ ID NO: 341 - DNA, 21 bp, Artificial Sequence
  Description of Artificial Sequence: Synthetic primer
cctaattcttttctatcggtg

SEQ ID NO: 342 - DNA, 20 bp, Artificial Sequence
  Description of Artificial Sequence: Synthetic primer
ctgtcctttttctggctttc

SEQ ID NO: 343 - DNA, 20 bp, Artificial Sequence
  Description of Artificial Sequence: Synthetic primer
ttgtaaccatagaaagcagg

SEQ ID NO: 344 - DNA, 20 bp, Artificial Sequence
  Description of Artificial Sequence: Synthetic primer
tgctgctgatgtaactgcag

SEQ ID NO: 345 - DNA, 20 bp, Artificial Sequence
  Description of Artificial Sequence: Synthetic primer
gtaatccactcattcagatc

SEQ ID NO: 346 - DNA, 20 bp, Artificial Sequence
  Description of Artificial Sequence: Synthetic primer
tttctaacatccaccttctg

SEQ ID NO: 347 - DNA, 21 bp, Artificial Sequence
  Description of Artificial Sequence: Synthetic primer
caggactgacctctaaaatag

SEQ ID NO: 348 - DNA, 20 bp, Artificial Sequence
  Description of Artificial Sequence: Synthetic primer
accttaacaaagttctgtgg

SEQ ID NO: 349 - DNA, 20 bp, Artificial Sequence
  Description of Artificial Sequence: Synthetic primer
ccagacaagctaaaatacag

SEQ ID NO: 350 - DNA, 20 bp, Artificial Sequence
  Description of Artificial Sequence: Synthetic primer
ctatagcacagtagggtgac

SEQ ID NO: 351 - DNA, 20 bp, Artificial Sequence
  Description of Artificial Sequence: Synthetic primer
tattcatgtaacaccgaagg

SEQ ID NO: 352 - DNA, 20 bp, Artificial Sequence
  Description of Artificial Sequence: Synthetic primer
ggaggcattccattcttttc

SEQ ID NO: 353 - DNA, 20 bp, Artificial Sequence
  Description of Artificial Sequence: Synthetic primer
taatccccaagagagaggac

SEQ ID NO: 354 - DNA, 20 bp, Artificial Sequence
  Description of Artificial Sequence: Synthetic primer
gtgtgtatttgcccttctgc

SEQ ID NO: 355 - DNA, 20 bp, Artificial Sequence
  Description of Artificial Sequence: Synthetic primer
gttctgaagtacatgtgcag

SEQ ID NO: 356 - DNA, 20 bp, Artificial Sequence
  Description of Artificial Sequence: Synthetic primer
caagtttacaatcacagctg

SEQ ID NO: 357 - DNA, 20 bp, Artificial Sequence
  Description of Artificial Sequence: Synthetic primer
cagcccagaatggctttgaa

SEQ ID NO: 358 - DNA, 20 bp, Artificial Sequence
  Description of Artificial Sequence: Synthetic primer
atctgccccatgatccaatc

SEQ ID NO: 359 - DNA, 20 bp, Artificial Sequence
  Description of Artificial Sequence: Synthetic primer
tatgttgggtcacaaacctg

SEQ ID NO: 360 - DNA, 20 bp, Artificial Sequence
  Description of Artificial Sequence: Synthetic primer
gttgctcacaatactggagg

SEQ ID NO: 361 - DNA, 20 bp, Artificial Sequence
  Description of Artificial Sequence: Synthetic primer
taaggcagagggctacttac

SEQ ID NO: 362 - DNA, 20 bp, Artificial Sequence
  Description of Artificial Sequence: Synthetic primer
attaccagagtggttgctcc

SEQ ID NO: 363 - DNA, 20 bp, Artificial Sequence
  Description of Artificial Sequence: Synthetic primer
aggctgacagaaggaaatcg

SEQ ID NO: 364 - DNA, 20 bp, Artificial Sequence
  Description of Artificial Sequence: Synthetic primer
tcagcagagaccaccaaaac

SEQ ID NO: 365 - DNA, 20 bp, Artificial Sequence
  Description of Artificial Sequence: Synthetic primer
tgagaagaagacactgaagg

SEQ ID NO: 366 - DNA, 20 bp, Artificial Sequence
  Description of Artificial Sequence: Synthetic primer
cccatttttcttccaatcac

SEQ ID NO: 367 - DNA, 20 bp, Artificial Sequence
  Description of Artificial Sequence: Synthetic primer
tcttctcaacctccttcctc

SEQ ID NO: 368 - DNA, 20 bp, Artificial Sequence
  Description of Artificial Sequence: Synthetic primer
tttataaacatgagcagaac

SEQ ID NO: 369 - DNA, 21 bp, Artificial Sequence
  Description of Artificial Sequence: Synthetic primer
gccaattttgccttactaacc

SEQ ID NO: 370 - DNA, 20 bp, Artificial Sequence
  Description of Artificial Sequence: Synthetic primer
atcaccagctgccacttttc

SEQ ID NO: 371 - DNA, 20 bp, Artificial Sequence
  Description of Artificial Sequence: Synthetic primer
ttctgcctaggtggcttatg

SEQ ID NO: 372 - DNA, 20 bp, Artificial Sequence
  Description of Artificial Sequence: Synthetic primer
cacacagtgaatcatgtctg

SEQ ID NO: 373 - DNA, 20 bp, Artificial Sequence
  Description of Artificial Sequence: Synthetic primer
tatctgtagacgtgcatccc

SEQ ID NO: 374 - DNA, 18 bp, Artificial Sequence
  Description of Artificial Sequence: Synthetic primer
gggagaatcatggcttga

SEQ ID NO: 375 - DNA, 20 bp, Artificial Sequence
  Description of Artificial Sequence: Synthetic primer
tcaacagtctccagctgatc

SEQ ID NO: 376 - DNA, 20 bp, Artificial Sequence
  Description of Artificial Sequence: Synthetic primer
tacacctgtgagcactgaca

SEQ ID NO: 377 - DNA, 20 bp, Artificial Sequence
  Description of Artificial Sequence: Synthetic primer
aatggtttagcaccatcccc

SEQ ID NO: 378 - DNA, 20 bp, Artificial Sequence
  Description of Artificial Sequence: Synthetic primer
aggctgcaagttttccaaac

SEQ ID NO: 379 - DNA, 20 bp, Artificial Sequence
  Description of Artificial Sequence: Synthetic primer
ttcttctcactgacctattc

SEQ ID NO: 380 - DNA, 20 bp, Artificial Sequence
  Description of Artificial Sequence: Synthetic primer
atcaaacagaaacgctggag

SEQ ID NO: 381 - DNA, 20 bp, Artificial Sequence
  Description of Artificial Sequence: Synthetic primer
ggtcttttgtttgctaggac

SEQ ID NO: 382 - DNA, 20 bp, Artificial Sequence
  Description of Artificial Sequence: Synthetic primer
tctgagtcttttgtggtacc

SEQ ID NO: 383 - DNA, 20 bp, Artificial Sequence
  Description of Artificial Sequence: Synthetic primer
aggagctgaaacgatggttc

SEQ ID NO: 384 - DNA, 20 bp, Artificial Sequence
  Description of Artificial Sequence: Synthetic primer
acattgtgtctgtgcttctc

SEQ ID NO: 385 - DNA, 20 bp, Artificial Sequence
  Description of Artificial Sequence: Synthetic primer
ttacaacaagtgctcaaggg

SEQ ID NO: 386 - DNA, 20 bp, Artificial Sequence
  Description of Artificial Sequence: Synthetic primer
gaatgaccatatgatccagc

SEQ ID NO: 387 - DNA, 21 bp, Artificial Sequence
  Description of Artificial Sequence: Synthetic primer
gacagataccctaacttgatc

SEQ ID NO: 388 - DNA, 20 bp, Artificial Sequence
  Description of Artificial Sequence: Synthetic primer
gtacctcaacacaaaaaggc

SEQ ID NO: 389 - DNA, 21 bp, Artificial Sequence
  Description of Artificial Sequence: Synthetic primer
gctagatatactaggcaagag

SEQ ID NO: 390 - DNA, 20 bp, Artificial Sequence
  Description of Artificial Sequence: Synthetic primer
tgtcatccgaaaagatgaac

SEQ ID NO: 391 - DNA, 20 bp, Artificial Sequence
  Description of Artificial Sequence: Synthetic primer
ctattctgcaactttaccag

SEQ ID NO: 392 - DNA, 20 bp, Artificial Sequence
  Description of Artificial Sequence: Synthetic primer
ggctgtgtaggtttgtcctc

SEQ ID NO: 393 - DNA, 20 bp, Artificial Sequence
  Description of Artificial Sequence: Synthetic primer
gtggtacatcacattaacag

SEQ ID NO: 394 - DNA, 20 bp, Artificial Sequence
  Description of Artificial Sequence: Synthetic primer
cgtgactctctgtacagcat

SEQ ID NO: 395 - DNA, 20 bp, Artificial Sequence
  Description of Artificial Sequence: Synthetic primer
tagggtaaaatgtgcacagc

SEQ ID NO: 396 - DNA, 20 bp, Artificial Sequence
  Description of Artificial Sequence: Synthetic primer
tagggtaaaatgtgcacagc

SEQ ID NO: 397 - DNA, 20 bp, Artificial Sequence
  Description of Artificial Sequence: Synthetic primer
ttagtgaccttcatagaacc

SEQ ID NO: 398 - DNA, 20 bp, Artificial Sequence
  Description of Artificial Sequence: Synthetic primer
catatctacttgtgaactgc

SEQ ID NO: 399 - DNA, 20 bp, Artificial Sequence
  Description of Artificial Sequence: Synthetic primer
cccctataagagcaaaatac

SEQ ID NO: 400 - DNA, 20 bp, Artificial Sequence
  Description of Artificial Sequence: Synthetic primer
attccttctcaacccacatc

SEQ ID NO: 401 - DNA, 20 bp, Artificial Sequence
  Description of Artificial Sequence: Synthetic primer
cctctgcatagatacagtag

SEQ ID NO: 402 - DNA, 20 bp, Artificial Sequence
  Description of Artificial Sequence: Synthetic primer
tggttacttaggttgatgcc

SEQ ID NO: 403 - DNA, 20 bp, Artificial Sequence
  Description of Artificial Sequence: Synthetic primer
ggccttagggtttccataac

SEQ ID NO: 404 - DNA, 20 bp, Artificial Sequence
  Description of Artificial Sequence: Synthetic primer
aggagaatcgcttgaacctg

SEQ ID NO: 405 - DNA, 20 bp, Artificial Sequence
  Description of Artificial Sequence: Synthetic primer
aggctttcaaacaaaatagg

SEQ ID NO: 406 - DNA, 20 bp, Artificial Sequence
  Description of Artificial Sequence: Synthetic primer
aggctttcaaacaaaatagg

SEQ ID NO: 407 - DNA, 20 bp, Artificial Sequence
  Description of Artificial Sequence: Synthetic primer
gataacagtgtttcaaatgc

SEQ ID NO: 408 - DNA, 20 bp, Artificial Sequence
  Description of Artificial Sequence: Synthetic primer
taaccaatccctgtcactgg

SEQ ID NO: 409 - DNA, 20 bp, Artificial Sequence
  Description of Artificial Sequence: Synthetic primer
cctgagttcatttagatctc

SEQ ID NO: 410 - DNA, 21 bp, Artificial Sequence
  Description of Artificial Sequence: Synthetic primer
ccagtaaacactgaagagatc

SEQ ID NO: 411 - DNA, 20 bp, Artificial Sequence
  Description of Artificial Sequence: Synthetic primer
agctcttgaaggcaattctg

SEQ ID NO: 412 - DNA, 20 bp, Artificial Sequence
  Description of Artificial Sequence: Synthetic primer
aacaaggtccaccacctcct

SEQ ID NO: 413 - DNA, 20 bp, Artificial Sequence
  Description of Artificial Sequence: Synthetic primer
acacacccacacaaactcac

SEQ ID NO: 414 - DNA, 20 bp, Artificial Sequence
  Description of Artificial Sequence: Synthetic primer
tttggacaattcttgtagcc

SEQ ID NO: 415 - DNA, 20 bp, Artificial Sequence
  Description of Artificial Sequence: Synthetic primer
cccaggcacacatatatgag

SEQ ID NO: 416 - DNA, 20 bp, Artificial Sequence
  Description of Artificial Sequence: Synthetic primer
gctgattgctctgtgatacc

SEQ ID NO: 417 - DNA, 20 bp, Artificial Sequence
  Description of Artificial Sequence: Synthetic primer
tctaggtacccaagctcctg

SEQ ID NO: 418 - DNA, 20 bp, Artificial Sequence
  Description of Artificial Sequence: Synthetic primer
gcctggaacactaaagatgg

SEQ ID NO: 419 - DNA, 20 bp, Artificial Sequence
  Description of Artificial Sequence: Synthetic primer
aaattagtcagtcatggtgg

SEQ ID NO: 420 - DNA, 20 bp, Artificial Sequence
  Description of Artificial Sequence: Synthetic primer
tcctcatttactacagtgac

SEQ ID NO: 421 - DNA, 21 bp, Artificial Sequence
  Description of Artificial Sequence: Synthetic primer
ctggaattacaaagagaagag

SEQ ID NO: 422 - DNA, 20 bp, Artificial Sequence
  Description of Artificial Sequence: Synthetic primer
attgtgtttgcccactttcc

SEQ ID NO: 423 - DNA, 20 bp, Artificial Sequence
  Description of Artificial Sequence: Synthetic primer
atttgtgctcctttctactg

SEQ ID NO: 424 - DNA, 20 bp, Artificial Sequence
  Description of Artificial Sequence: Synthetic primer
ttccaaacacagcaaagagc

SEQ ID NO: 425 - DNA, 20 bp, Artificial Sequence
  Description of Artificial Sequence: Synthetic primer
tctgaaactcagaatgcatg

SEQ ID NO: 426 - DNA, 20 bp, Artificial Sequence
  Description of Artificial Sequence: Synthetic primer
gtactagcagtagtcagagg

SEQ ID NO: 427 - DNA, 21 bp, Artificial Sequence
  Description of Artificial Sequence: Synthetic primer
ccttgggatttagaaataggg

SEQ ID NO: 428 - DNA, 20 bp, Artificial Sequence
  Description of Artificial Sequence: Synthetic primer
ttggcaactgtgtaaccttg

SEQ ID NO: 429 - DNA, 21 bp, Artificial Sequence
  Description of Artificial Sequence: Synthetic primer
gaacacaatcgcaagtttaag

SEQ ID NO: 430 - DNA, 20 bp, Artificial Sequence
  Description of Artificial Sequence: Synthetic primer
acacacccacacaaactcac

SEQ ID NO: 431 - DNA, 20 bp, Artificial Sequence
  Description of Artificial Sequence: Synthetic primer
aacaaggtccaccacctcct

SEQ ID NO: 432 - DNA, 20 bp, Artificial Sequence
  Description of Artificial Sequence: Synthetic primer
cctgagttcatttagatctc

SEQ ID NO: 433 - DNA, 20 bp, Artificial Sequence
  Description of Artificial Sequence: Synthetic primer
ttccatgcattttaaccccg

SEQ ID NO: 434 - DNA, 20 bp, Artificial Sequence
  Description of Artificial Sequence: Synthetic primer
ttaggccgagattttcagag

SEQ ID NO: 435 - DNA, 20 bp, Artificial Sequence
  Description of Artificial Sequence: Synthetic primer
cagggcatctaaattgaacg

SEQ ID NO: 436 - DNA, 20 bp, Artificial Sequence
  Description of Artificial Sequence: Synthetic primer
gttagtacagggttgatcac

SEQ ID NO: 437 - DNA, 21 bp, Artificial Sequence
  Description of Artificial Sequence: Synthetic primer
gcatctctaaaggtgatttgg

SEQ ID NO: 438 - DNA, 20 bp, Artificial Sequence
  Description of Artificial Sequence: Synthetic primer
tattgttccccagtattagg

SEQ ID NO: 439 - DNA, 20 bp, Artificial Sequence
  Description of Artificial Sequence: Synthetic primer
attagagctatggactcacc

SEQ ID NO: 440 - DNA, 20 bp, Artificial Sequence
  Description of Artificial Sequence: Synthetic primer
tgaagactggagctatcttc

SEQ ID NO: 441 - DNA, 20 bp, Artificial Sequence
  Description of Artificial Sequence: Synthetic primer
ccatttacctactcagcagg

SEQ ID NO: 442 - DNA, 20 bp, Artificial Sequence
  Description of Artificial Sequence: Synthetic primer
aattagccaggcatggttgc

SEQ ID NO: 443 - DNA, 20 bp, Artificial Sequence
  Description of Artificial Sequence: Synthetic primer
aagaagaaacgaatgtttac

SEQ ID NO: 444 - DNA, 20 bp, Artificial Sequence
  Description of Artificial Sequence: Synthetic primer
ggggaaaaatgagaatagac

SEQ ID NO: 445 - DNA, 20 bp, Artificial Sequence
  Description of Artificial Sequence: Synthetic primer
actgaaatgttccatgtgag

SEQ ID NO: 446 - DNA, 20 bp, Artificial Sequence
  Description of Artificial Sequence: Synthetic primer
agggaaagtacaacttagcc

SEQ ID NO: 447 - DNA, 20 bp, Artificial Sequence
  Description of Artificial Sequence: Synthetic primer
ttcatgagtactctagctgg

SEQ ID NO: 448 - DNA, 20 bp, Artificial Sequence
  Description of Artificial Sequence: Synthetic primer
gggaagcttttctgaagatg

SEQ ID NO: 449 - DNA, 20 bp, Artificial Sequence
  Description of Artificial Sequence: Synthetic primer
tgagggaagcttttctgaag

SEQ ID NO: 450 - DNA, 20 bp, Artificial Sequence
  Description of Artificial Sequence: Synthetic primer
caaacagttaaccctgaacc

SEQ ID NO: 451 - DNA, 20 bp, Artificial Sequence
  Description of Artificial Sequence: Synthetic primer
gggtaggagataaagtcagc

SEQ ID NO: 452 - DNA, 20 bp, Artificial Sequence
  Description of Artificial Sequence: Synthetic primer
gctctgttttcatgaggttc

SEQ ID NO: 453 - DNA, 20 bp, Artificial Sequence
  Description of Artificial Sequence: Synthetic primer
actccagttgtaggtagaag

SEQ ID NO: 454 - DNA, 20 bp, Artificial Sequence
  Description of Artificial Sequence: Synthetic primer
tttttttccctgtatgcctc

SEQ ID NO: 455 - DNA, 20 bp, Artificial Sequence
  Description of Artificial Sequence: Synthetic primer
tagccattctagtggatgtg

SEQ ID NO: 456 - DNA, 20 bp, Artificial Sequence
  Description of Artificial Sequence: Synthetic primer
cacagaaaccgaaaaccaac

SEQ ID NO: 457 - DNA, 21 bp, Artificial Sequence
  Description of Artificial Sequence: Synthetic primer
gtctttagagactcaaaaggg

SEQ ID NO: 458 - DNA, 19 bp, Artificial Sequence
  Description of Artificial Sequence: Synthetic primer
ttattatataacgtaggaa

SEQ ID NO: 459 - DNA, 20 bp, Artificial Sequence
  Description of Artificial Sequence: Synthetic primer
ctacgcaataggctattttc

SEQ ID NO: 460 - DNA, 20 bp, Artificial Sequence
  Description of Artificial Sequence: Synthetic primer
tatgagcgagaatatgtggc

SEQ ID NO: 461 - DNA, 20 bp, Artificial Sequence
  Description of Artificial Sequence: Synthetic primer
ctttagccttttgttggacg

SEQ ID NO: 462 - DNA, 20 bp, Artificial Sequence
  Description of Artificial Sequence: Synthetic primer
aaggcaaacccttaataggc

SEQ ID NO: 463 - DNA, 20 bp, Artificial Sequence
  Description of Artificial Sequence: Synthetic primer
aacgtttctgtgagtgcaag

SEQ ID NO: 464 - DNA, 20 bp, Artificial Sequence
  Description of Artificial Sequence: Synthetic primer
tgcatacattgcgaagattc

SEQ ID NO: 465 - DNA, 20 bp, Artificial Sequence
  Description of Artificial Sequence: Synthetic primer
aatgaactaaatactccaag

SEQ ID NO: 466 - DNA, 20 bp, Artificial Sequence
  Description of Artificial Sequence: Synthetic primer
tccaaaatgttccaatgagc

SEQ ID NO: 467 - DNA, 21 bp, Artificial Sequence
  Description of Artificial Sequence: Synthetic primer
gaagctagaaagctaagagtg

SEQ ID NO: 468 - DNA, 21 bp, Artificial Sequence
  Description of Artificial Sequence: Synthetic primer
caaacaaaatagagtccagcg

SEQ ID NO: 469 - DNA, 20 bp, Artificial Sequence
  Description of Artificial Sequence: Synthetic primer
tccctctatttttctactac

SEQ ID NO: 470 - DNA, 20 bp, Artificial Sequence
  Description of Artificial Sequence: Synthetic primer
gtgcaatagtaactgggctc

SEQ ID NO: 471 - DNA, 20 bp, Artificial Sequence
  Description of Artificial Sequence: Synthetic primer
tacctagaggaaataagtgg

SEQ ID NO: 472 - DNA, 21 bp, Artificial Sequence
  Description of Artificial Sequence: Synthetic primer
ggtgtgaataagttgtaatcc

SEQ ID NO: 473 - DNA, 20 bp, Artificial Sequence
  Description of Artificial Sequence: Synthetic primer
acatccactttctgtagatc

SEQ ID NO: 474 - DNA, 20 bp, Artificial Sequence
  Description of Artificial Sequence: Synthetic primer
gagccacgaaaaaaaaaatg

SEQ ID NO: 475 - DNA, 20 bp, Artificial Sequence
  Description of Artificial Sequence: Synthetic primer
caaatacacacagacacatc

SEQ ID NO: 476 - DNA, 20 bp, Artificial Sequence
  Description of Artificial Sequence: Synthetic primer
tcttcgtgttgggcacattc

SEQ ID NO: 477 - DNA, 20 bp, Artificial Sequence
  Description of Artificial Sequence: Synthetic primer
ggaacagcaaactgaaacag

SEQ ID NO: 478 - DNA, 20 bp, Artificial Sequence
  Description of Artificial Sequence: Synthetic primer
gtgtatccaaagctttagtg

SEQ ID NO: 479 - DNA, 20 bp, Artificial Sequence
  Description of Artificial Sequence: Synthetic primer
aactaacacagatggccacc

SEQ ID NO: 480 - DNA, 20 bp, Artificial Sequence
  Description of Artificial Sequence: Synthetic primer
ggcatgtgataggaatgtgc

SEQ ID NO: 481 - DNA, 20 bp, Artificial Sequence
  Description of Artificial Sequence: Synthetic primer
ttaatacctaggtgatgggc

SEQ ID NO: 482 - DNA, 21 bp, Artificial Sequence
  Description of Artificial Sequence: Synthetic primer
ggtaaatgtatttgacagttg

SEQ ID NO: 483 - DNA, 20 bp, Artificial Sequence
  Description of Artificial Sequence: Synthetic primer
actaacgatgggtgatgagc

SEQ ID NO: 484 - DNA, 20 bp, Artificial Sequence
  Description of Artificial Sequence: Synthetic primer
cccctgaaaacctcatgttg

SEQ ID NO: 485 - DNA, 20 bp, Artificial Sequence
  Description of Artificial Sequence: Synthetic primer
agcaaggcgtacaaaacaac

SEQ ID NO: 486 - DNA, 20 bp, Artificial Sequence
  Description of Artificial Sequence: Synthetic primer
tgtcttcagcagaactcatc

SEQ ID NO: 487 - DNA, 22 bp, Artificial Sequence
  Description of Artificial Sequence: Synthetic primer
gcattttacaagacttaaatcg

SEQ ID NO: 488 - DNA, 20 bp, Artificial Sequence
  Description of Artificial Sequence: Synthetic primer
atttccttctgtcagcctgc

SEQ ID NO: 489 - DNA, 20 bp, Artificial Sequence
  Description of Artificial Sequence: Synthetic primer
tcagcagagaccaccaaaac

SEQ ID NO: 490 - DNA, 20 bp, Artificial Sequence
  Description of Artificial Sequence: Synthetic primer
ggtggtcgttgctgattttg

SEQ ID NO: 491 - DNA, 20 bp, Artificial Sequence
  Description of Artificial Sequence: Synthetic primer
atcccaatgatcctcaatcc

SEQ ID NO: 492 - DNA, 20 bp, Artificial Sequence
  Description of Artificial Sequence: Synthetic primer
ggagcaaccaggagtaaata

SEQ ID NO: 493 - DNA, 20 bp, Artificial Sequence
  Description of Artificial Sequence: Synthetic primer
atgactcttctagggcctca

SEQ ID NO: 494 - DNA, 21 bp, Artificial Sequence
  Description of Artificial Sequence: Synthetic primer
cgcattcaactttatgagagg

SEQ ID NO: 495 - DNA, 20 bp, Artificial Sequence
  Description of Artificial Sequence: Synthetic primer
ctagcattaaccagagatac

SEQ ID NO: 496 - DNA, 20 bp, Artificial Sequence
  Description of Artificial Sequence: Synthetic primer
cctcaaattatcaccagccc

SEQ ID NO: 497 - DNA, 20 bp, Artificial Sequence
  Description of Artificial Sequence: Synthetic primer
aatcatgtctgcatggcacg

SEQ ID NO: 498 - DNA, 20 bp, Artificial Sequence
  Description of Artificial Sequence: Synthetic primer
atggtagaccatcaggtagg

SEQ ID NO: 499 - DNA, 20 bp, Artificial Sequence
  Description of Artificial Sequence: Synthetic primer
ctgacacctgtcctcataag

SEQ ID NO: 500 - DNA, 20 bp, Artificial Sequence
  Description of Artificial Sequence: Synthetic primer
gtactgcccttagcaaatcc

SEQ ID NO: 501 - DNA, 20 bp, Artificial Sequence
  Description of Artificial Sequence: Synthetic primer
actctggctgttgtaaggag

SEQ ID NO: 502 - DNA, 20 bp, Artificial Sequence
  Description of Artificial Sequence: Synthetic primer
ccttttctcaaggtgtgtgc

SEQ ID NO: 503 - DNA, 20 bp, Artificial Sequence
  Description of Artificial Sequence: Synthetic primer
gggaggtgacacacactttt

SEQ ID NO: 504 - DNA, 20 bp, Artificial Sequence
  Description of Artificial Sequence: Synthetic primer
gcctaagcaaagaaatgagc

SEQ ID NO: 505 - DNA, 20 bp, Artificial Sequence
  Description of Artificial Sequence: Synthetic primer
atcaaacagaaacgctggag

SEQ ID NO: 506 - DNA, 21 bp, Artificial Sequence
  Description of Artificial Sequence: Synthetic primer
ctctttttttgtctgactggg

SEQ ID NO: 507 - DNA, 20 bp, Artificial Sequence
  Description of Artificial Sequence: Synthetic primer
gtaacctgccaagattgaac

SEQ ID NO: 508 - DNA, 20 bp, Artificial Sequence
  Description of Artificial Sequence: Synthetic primer
tgcagattcaatgcaatccc

SEQ ID NO: 509 - DNA, 20 bp, Artificial Sequence
  Description of Artificial Sequence: Synthetic primer
caaaatggcatgacactggc

SEQ ID NO: 510 - DNA, 20 bp, Artificial Sequence
  Description of Artificial Sequence: Synthetic primer
gcagtctcttattgtctgag

SEQ ID NO: 511 - DNA, 20 bp, Artificial Sequence
  Description of Artificial Sequence: Synthetic primer
gtgtcttctctaacagtgag

SEQ ID NO: 512 - DNA, 20 bp, Artificial Sequence
  Description of Artificial Sequence: Synthetic primer
taggtatccctttgatgtcc

SEQ ID NO: 513 - DNA, 21 bp, Artificial Sequence
  Description of Artificial Sequence: Synthetic primer
gcagtaaagctatcaatcctg

SEQ ID NO: 514 - DNA, 21 bp, Artificial Sequence
  Description of Artificial Sequence: Synthetic primer
gaggaaatctttcacctttcc

SEQ ID NO: 515 - DNA, 20 bp, Artificial Sequence
  Description of Artificial Sequence: Synthetic primer
tgtcatccgaaaagatgaac

SEQ ID NO: 516 - DNA, 21 bp, Artificial Sequence
  Description of Artificial Sequence: Synthetic primer
gctagatatactaggcaagag

SEQ ID NO: 517 - DNA, 20 bp, Artificial Sequence
  Description of Artificial Sequence: Synthetic primer
tagaaggaagtcaattgttc

SEQ ID NO: 518 - DNA, 20 bp, Artificial Sequence
  Description of Artificial Sequence: Synthetic primer
ttcatcccattccatccagc

SEQ ID NO: 519 - DNA, 20 bp, Artificial Sequence
  Description of Artificial Sequence: Synthetic primer
ttccttctttgtgtagttcg

SEQ ID NO: 520 - DNA, 20 bp, Artificial Sequence
  Description of Artificial Sequence: Synthetic primer
cagcactaggctgtgaaaag

SEQ ID NO: 521 - DNA, 20 bp, Artificial Sequence
  Description of Artificial Sequence: Synthetic primer
gcattgttagtggttgctcc

SEQ ID NO: 522 - DNA, 20 bp, Artificial Sequence
  Description of Artificial Sequence: Synthetic primer
gcattgttagtggttgctcc

SEQ ID NO: 523 - DNA, 20 bp, Artificial Sequence
  Description of Artificial Sequence: Synthetic primer
caggcattcttagaagacag

SEQ ID NO: 524 - DNA, 20 bp, Artificial Sequence
  Description of Artificial Sequence: Synthetic primer
gaaggtaaaaccactgatgc

SEQ ID NO: 525 - DNA, 21 bp, Artificial Sequence
  Description of Artificial Sequence: Synthetic primer
gaacttttcagaaagcatcag

SEQ ID NO: 526 - DNA, 20 bp, Artificial Sequence
  Description of Artificial Sequence: Synthetic primer
acattacaggaaggcctttc

SEQ ID NO: 527 - DNA, 20 bp, Artificial Sequence
  Description of Artificial Sequence: Synthetic primer
ctcttatacaccctgattgg

SEQ ID NO: 528 - DNA, 20 bp, Artificial Sequence
  Description of Artificial Sequence: Synthetic primer
ctactgtatctatgcagagg

SEQ ID NO: 529 - DNA, 20 bp, Artificial Sequence
  Description of Artificial Sequence: Synthetic primer
aagccttggaagagtgagtg

SEQ ID NO: 530 - DNA, 20 bp, Artificial Sequence
  Description of Artificial Sequence: Synthetic primer
tggagtctcattctgtcacc

SEQ ID NO: 531 - DNA, 20 bp, Artificial Sequence
  Description of Artificial Sequence: Synthetic primer
ttacgggtctgataagaaag

SEQ ID NO: 532 - DNA, 20 bp, Artificial Sequence
  Description of Artificial Sequence: Synthetic primer
ttacgggtctgataagaaag

SEQ ID NO: 533 - DNA, 20 bp, Artificial Sequence
  Description of Artificial Sequence: Synthetic primer
gaaattgcaagctgattgtt

SEQ ID NO: 534 - DNA, 20 bp, Artificial Sequence
  Description of Artificial Sequence: Synthetic primer
acaaagatgggcactgcaac

SEQ ID NO: 535 - DNA, 20 bp, Artificial Sequence
  Description of Artificial Sequence: Synthetic primer
acggaacaaccaaacaatag

SEQ ID NO: 536 - DNA, 21 bp, Artificial Sequence
  Description of Artificial Sequence: Synthetic primer
gatttgtgtcttactcactgg

SEQ ID NO: 537 - DNA, 20 bp, Artificial Sequence
  Description of Artificial Sequence: Synthetic primer
tatgtcctcattgtcaaccc

SEQ ID NO: 538 - DNA, 20 bp, Artificial Sequence
  Description of Artificial Sequence: Synthetic primer
ttgtggccttccttgaggag

SEQ ID NO: 539 - DNA, 20 bp, Artificial Sequence
  Description of Artificial Sequence: Synthetic primer
tggaaagactgctattctgc

SEQ ID NO: 540 - DNA, 20 bp, Artificial Sequence
  Description of Artificial Sequence: Synthetic primer
tgtgagatgtgtgaggacag

SEQ ID NO: 541 - DNA, 20 bp, Artificial Sequence
  Description of Artificial Sequence: Synthetic primer
gcctgagtgtagtgagattc

SEQ ID NO: 542 - DNA, 20 bp, Artificial Sequence
  Description of Artificial Sequence: Synthetic primer
aagtgcagctggtgattctg

SEQ ID NO: 543 - DNA, 20 bp, Artificial Sequence
  Description of Artificial Sequence: Synthetic primer
aagagctgaaagggacactg

SEQ ID NO: 544 - DNA, 20 bp, Artificial Sequence
  Description of Artificial Sequence: Synthetic primer
ctcactgactctcagagaag

SEQ ID NO: 545 - DNA, 20 bp, Artificial Sequence
  Description of Artificial Sequence: Synthetic primer
ttcaagcaattctcctgcct

SEQ ID NO: 546 - DNA, 20 bp, Artificial Sequence
  Description of Artificial Sequence: Synthetic primer
cccatctctactaaaaatac

SEQ ID NO: 547 - DNA, 20 bp, Artificial Sequence
  Description of Artificial Sequence: Synthetic primer
cccatctctactaaaaatac

SEQ ID NO: 548 - DNA, 20 bp, Artificial Sequence
  Description of Artificial Sequence: Synthetic primer
gtggaacatcaagaatgaag

SEQ ID NO: 549 - DNA, 20 bp, Artificial Sequence
  Description of Artificial Sequence: Synthetic primer
agcagaaagaaggaaatgac

SEQ ID NO: 550 - DNA, 20 bp, Artificial Sequence
  Description of Artificial Sequence: Synthetic primer
ttggttgtattctggttggg

SEQ ID NO: 551 - DNA, 20 bp, Artificial Sequence
  Description of Artificial Sequence: Synthetic primer
atactctaaacaatacaggg

SEQ ID NO: 552 - DNA, 20 bp, Artificial Sequence
  Description of Artificial Sequence: Synthetic primer
gacaccactacttgcacatg

SEQ ID NO: 553 - DNA, 20 bp, Artificial Sequence
  Description of Artificial Sequence: Synthetic primer
gtaagcaaatatctctggag

SEQ ID NO: 554 - DNA, 21 bp, Artificial Sequence
  Description of Artificial Sequence: Synthetic primer
tcaaacatactgtttgctcac

SEQ ID NO: 555 - DNA, 20 bp, Artificial Sequence
  Description of Artificial Sequence: Synthetic primer
gttcttcaaaatctgcttcc

SEQ ID NO: 556 - DNA, 20 bp, Artificial Sequence
  Description of Artificial Sequence: Synthetic primer
tggaaagactgctattctgc

SEQ ID NO: 557 - DNA, 20 bp, Artificial Sequence
  Description of Artificial Sequence: Synthetic primer
ttgtggccttccttgaggag

SEQ ID NO: 558 - DNA, 20 bp, Artificial Sequence
  Description of Artificial Sequence: Synthetic primer
acggaacaaccaaacaatag

SEQ ID NO: 559 - DNA, 21 bp, Artificial Sequence
  Description of Artificial Sequence: Synthetic primer
tcagagcatagatgatggcaa

SEQ ID NO: 560 - DNA, 22 bp, Artificial Sequence
  Description of Artificial Sequence: Synthetic primer
agaggaggaaaccttaatttct

SEQ ID NO: 561 - DNA, 22 bp, Artificial Sequence
  Description of Artificial Sequence: Synthetic primer
agagtttgatgtcaaggaaatg

SEQ ID NO: 562 - DNA, 22 bp, Artificial Sequence
  Description of Artificial Sequence: Synthetic primer
taccatcaaaagcacatcattc

SEQ ID NO: 563 - DNA, 24 bp, Artificial Sequence
  Description of Artificial Sequence: Synthetic primer
gaattttcttccttttagaataga

SEQ ID NO: 564 - DNA, 21 bp, Artificial Sequence
  Description of Artificial Sequence: Synthetic primer
tggtgagtccatagctctaat

SEQ ID NO: 565 - DNA, 20 bp, Artificial Sequence
  Description of Artificial Sequence: Synthetic primer
ccagctactttatgccagag

SEQ ID NO: 566 - DNA, 18 bp, Artificial Sequence
  Description of Artificial Sequence: Synthetic primer
tggccaggccaaggatcg

SEQ ID NO: 567 - DNA, 22 bp, Artificial Sequence
  Description of Artificial Sequence: Synthetic primer
cagcctaaattaaccgtatgtg

SEQ ID NO: 568 - DNA, 18 bp, Artificial Sequence
  Description of Artificial Sequence: Synthetic primer
cctgcctgagcctgccaa

SEQ ID NO: 569 - DNA, 24 bp, Artificial Sequence
  Description of Artificial Sequence: Synthetic primer
ttcaataatattatagtgaggatg

SEQ ID NO: 570 - DNA, 22 bp, Artificial Sequence
  Description of Artificial Sequence: Synthetic primer
gacatgtagaaaaattgcctgc

SEQ ID NO: 571 - DNA, 22 bp, Artificial Sequence
  Description of Artificial Sequence: Synthetic primer
ttgcaaacaggttaaagagagt

SEQ ID NO: 572 - DNA, 21 bp, Artificial Sequence
  Description of Artificial Sequence: Synthetic primer
aagccctagggtattgtgatt

SEQ ID NO: 573 - DNA, 21 bp, Artificial Sequence
  Description of Artificial Sequence: Synthetic primer
aaggctagagagaacattcca

SEQ ID NO: 574 - DNA, 21 bp, Artificial Sequence
  Description of Artificial Sequence: Synthetic primer
aggggtctctatggaacaaaa

SEQ ID NO: 575 - DNA, 23 bp, Artificial Sequence
  Description of Artificial Sequence: Synthetic primer
aacaaaaggctttcttcttctaa

SEQ ID NO: 576 - DNA, 21 bp, Artificial Sequence
  Description of Artificial Sequence: Synthetic primer
caaaggataaagggaaccatc

SEQ ID NO: 577 - DNA, 20 bp, Artificial Sequence
  Description of Artificial Sequence: Synthetic primer
caggatactgcgatactgtc

SEQ ID NO: 578 - DNA, 24 bp, Artificial Sequence
  Description of Artificial Sequence: Synthetic primer
gtaatcttgtttgttgtatttttc

SEQ ID NO: 579 - DNA, 21 bp, Artificial Sequence
  Description of Artificial Sequence: Synthetic primer
ctggtgtgtagaaacacaaca

SEQ ID NO: 580 - DNA, 18 bp, Artificial Sequence
  Description of Artificial Sequence: Synthetic primer
gcccagggctcagggaag

SEQ ID NO: 581 - DNA, 21 bp, Artificial Sequence
  Description of Artificial Sequence: Synthetic primer
gcaaaccaaaaccacagtcac

SEQ ID NO: 582 - DNA, 20 bp, Artificial Sequence
  Description of Artificial Sequence: Synthetic primer
cccgcttataagcaagagca

SEQ ID NO: 583 - DNA, 20 bp, Artificial Sequence
  Description of Artificial Sequence: Synthetic primer
ttatccctatcctcccttcc

SEQ ID NO: 584 - DNA, 22 bp, Artificial Sequence
  Description of Artificial Sequence: Synthetic primer
gcatcactctttctacgcaata

SEQ ID NO: 585 - DNA, 23 bp, Artificial Sequence
  Description of Artificial Sequence: Synthetic primer
tgtttcaaaacatcactatgtac

SEQ ID NO: 586 - DNA, 22 bp, Artificial Sequence
  Description of Artificial Sequence: Synthetic primer
ggaaaggaagacattatggtac

SEQ ID NO: 587 - DNA, 21 bp, Artificial Sequence
  Description of Artificial Sequence: Synthetic primer
ccaagatccctgaaaggcaaa

SEQ ID NO: 588 - DNA, 22 bp, Artificial Sequence
  Description of Artificial Sequence: Synthetic primer
ctactttagccttttgttggac

SEQ ID NO: 589 - DNA, 21 bp, Artificial Sequence
  Description of Artificial Sequence: Synthetic primer
gcttcatacacacacacacat

SEQ ID NO: 590 - DNA, 20 bp, Artificial Sequence
  Description of Artificial Sequence: Synthetic primer
cccagactgtgtcattcttc

SEQ ID NO: 591 - DNA, 22 bp, Artificial Sequence
  Description of Artificial Sequence: Synthetic primer
gtgtttcttgtaagcagtatac

SEQ ID NO: 592 - DNA, 21 bp, Artificial Sequence
  Description of Artificial Sequence: Synthetic primer
aaactctttgagcgctgacat

SEQ ID NO: 593 - DNA, 21 bp, Artificial Sequence
  Description of Artificial Sequence: Synthetic primer
tctatcggtgatttctgctgt

SEQ ID NO: 594 - DNA, 22 bp, Artificial Sequence
  Description of Artificial Sequence: Synthetic primer
cacaattggcttttaaaactcc

SEQ ID NO: 595 - DNA, 21 bp, Artificial Sequence
  Description of Artificial Sequence: Synthetic primer
ccatagaaagcaggactggtt

SEQ ID NO: 596 - DNA, 23 bp, Artificial Sequence
  Description of Artificial Sequence: Synthetic primer
aaattagtctagaacttgtggaa

SEQ ID NO: 597 - DNA, 22 bp, Artificial Sequence
  Description of Artificial Sequence: Synthetic primer
ccactcattcagatctacagaa

SEQ ID NO: 598 - DNA, 21 bp, Artificial Sequence
  Description of Artificial Sequence: Synthetic primer
acatccaccttctgtagatct

SEQ ID NO: 599 - DNA, 22 bp, Artificial Sequence
  Description of Artificial Sequence: Synthetic primer
gtgtgaataagttgtaatccac

SEQ ID NO: 600 - DNA, 23 bp, Artificial Sequence
  Description of Artificial Sequence: Synthetic primer
tgtggaaatatttgaagactctt

SEQ ID NO: 601 - DNA, 22 bp, Artificial Sequence
  Description of Artificial Sequence: Synthetic primer
atacagagaagtagaggacaaa

SEQ ID NO: 602 - DNA, 22 bp, Artificial Sequence
  Description of Artificial Sequence: Synthetic primer
cacagtagggtgactacaatta

SEQ ID NO: 603 - DNA, 20 bp, Artificial Sequence
  Description of Artificial Sequence: Synthetic primer
taacaccgaaggttcctcag

SEQ ID NO: 604 - DNA, 23 bp, Artificial Sequence
  Description of Artificial Sequence: Synthetic primer
cattcttttccagtgtcaatcaa

SEQ ID NO: 605 - DNA, 23 bp, Artificial Sequence
  Description of Artificial Sequence: Synthetic primer
ggacttggcagcattatttatta

SEQ ID NO: 606 - DNA, 20 bp, Artificial Sequence
  Description of Artificial Sequence: Synthetic primer
cagctaattgtgctccctca

SEQ ID NO: 607 - DNA, 21 bp, Artificial Sequence
  Description of Artificial Sequence: Synthetic primer
aagtacatgtgcagaatgtgc

SEQ ID NO: 608 - DNA, 23 bp, Artificial Sequence
  Description of Artificial Sequence: Synthetic primer
atcacagctgataatgtcataat

SEQ ID NO: 609 - DNA, 22 bp, Artificial Sequence
  Description of Artificial Sequence: Synthetic primer
gaatggctttgaatatgaccca

SEQ ID NO: 610 - DNA, 20 bp, Artificial Sequence
  Description of Artificial Sequence: Synthetic primer
caggtgctatcacaacatcg

SEQ ID NO: 611 - DNA, 22 bp, Artificial Sequence
  Description of Artificial Sequence: Synthetic primer
cacaaacctgccattttacttt

SEQ ID NO: 612 - DNA, 20 bp, Artificial Sequence
  Description of Artificial Sequence: Synthetic primer
aatactggaggctggaagac

SEQ ID NO: 613 - DNA, 22 bp, Artificial Sequence
  Description of Artificial Sequence: Synthetic primer
cagagggctacttacaagaatt

SEQ ID NO: 614 - DNA, 19 bp, Artificial Sequence
  Description of Artificial Sequence: Synthetic primer
tcttgctggtctgtccctc

SEQ ID NO: 615 - DNA, 18 bp, Artificial Sequence
  Description of Artificial Sequence: Synthetic primer
agttgacggtgtcctcgt

SEQ ID NO: 616 - DNA, 18 bp, Artificial Sequence
  Description of Artificial Sequence: Synthetic primer
atcaccgccatcctcccc

SEQ ID NO: 617 - DNA, 19 bp, Artificial Sequence
  Description of Artificial Sequence: Synthetic primer
gaaattctagtggaaaaag

SEQ ID NO: 618 - DNA, 24 bp, Artificial Sequence
  Description of Artificial Sequence: Synthetic primer
aaaatttcaatatgttgcaggcag

SEQ ID NO: 619 - DNA, 18 bp, Artificial Sequence
  Description of Artificial Sequence: Synthetic primer
cctcccctcctgctcttc

SEQ ID NO: 620 - DNA, 19 bp, Artificial Sequence
  Description of Artificial Sequence: Synthetic primer
ggacctcaccacctgaaag

SEQ ID NO: 621 - DNA, 19 bp, Artificial Sequence
  Description of Artificial Sequence: Synthetic primer
tgccttactaacctccagg

SEQ ID NO: 622 - DNA, 21 bp, Artificial Sequence
  Description of Artificial Sequence: Synthetic primer
ctgccacttttcattacaggc

SEQ ID NO: 623 - DNA, 20 bp, Artificial Sequence
  Description of Artificial Sequence: Synthetic primer
taggtggcttatggtagacc

SEQ ID NO: 624 - DNA, 18 bp, Artificial Sequence
  Description of Artificial Sequence: Synthetic primer
tctgcatggcacgcccct

SEQ ID NO: 625 - DNA, 20 bp, Artificial Sequence
  Description of Artificial Sequence: Synthetic primer
ccctctgtggtctgtgctaa

SEQ ID NO: 626 - DNA, 20 bp, Artificial Sequence
  Description of Artificial Sequence: Synthetic primer
gaatcatggcttgactcagg

SEQ ID NO: 627 - DNA, 18 bp, Artificial Sequence
  Description of Artificial Sequence: Synthetic primer
gcccctcaccacatccca

SEQ ID NO: 628 - DNA, 18 bp, Artificial Sequence
  Description of Artificial Sequence: Synthetic primer
cccacccagcaggaagac

SEQ ID NO: 629 - DNA, 21 bp, Artificial Sequence
  Description of Artificial Sequence: Synthetic primer
cctgcgtactattcttatgac

SEQ ID NO: 630 - DNA, 22 bp, Artificial Sequence
  Description of Artificial Sequence: Synthetic primer
ttttacactctgcttccctttt

SEQ ID NO: 631 - DNA, 23 bp, Artificial Sequence
  Description of Artificial Sequence: Synthetic primer
ttctcactgacctattctatttt

SEQ ID NO: 632 - DNA, 23 bp, Artificial Sequence
  Description of Artificial Sequence: Synthetic primer
agcttcaaaaatagaataggtca

SEQ ID NO: 633 - DNA, 23 bp, Artificial Sequence
  Description of Artificial Sequence: Synthetic primer
ctttgatctcatcacttgttatt

SEQ ID NO: 634 - DNA, 22 bp, Artificial Sequence
  Description of Artificial Sequence: Synthetic primer
ttctgtttctgtgaagaatgtc

SEQ ID NO: 635 - DNA, 19 bp, Artificial Sequence
  Description of Artificial Sequence: Synthetic primer
gccaggctcacagtccaaa

SEQ ID NO: 636 - DNA, 21 bp, Artificial Sequence
  Description of Artificial Sequence: Synthetic primer
ttggacgtaggacaaagaact

SEQ ID NO: 637 - DNA, 21 bp, Artificial Sequence
  Description of Artificial Sequence: Synthetic primer
gctcaagggagttctacatct

SEQ ID NO: 638 - DNA, 22 bp, Artificial Sequence
  Description of Artificial Sequence: Synthetic primer
gaccatatgatccagcaatttc

SEQ ID NO: 639 - DNA, 24 bp, Artificial Sequence
  Description of Artificial Sequence: Synthetic primer
gcttataacaaaatatcatgtgtc

SEQ ID NO: 640 - DNA, 21 bp, Artificial Sequence
  Description of Artificial Sequence: Synthetic primer
gccatatatgacaaacccaca

SEQ ID NO: 641 - DNA, 23 bp, Artificial Sequence
  Description of Artificial Sequence: Synthetic primer
atatactaggcaagagatagaaa

SEQ ID NO: 642 - DNA, 24 bp, Artificial Sequence
  Description of Artificial Sequence: Synthetic primer
cttccttctattcaatttcaattt

SEQ ID NO: 643 - DNA, 23 bp, Artificial Sequence
  Description of Artificial Sequence: Synthetic primer
ctataaataagatcatgtcatcc

SEQ ID NO: 644 - DNA, 20 bp, Artificial Sequence
  Description of Artificial Sequence: Synthetic primer
cagacccatcagagaagtac

SEQ ID NO: 645 - DNA, 23 bp, Artificial Sequence
  Description of Artificial Sequence: Synthetic primer
ccaaataagcatatgaatagatg

SEQ ID NO: 646 - DNA, 21 bp, Artificial Sequence
  Description of Artificial Sequence: Synthetic primer
cagcattgttagtggttgctc

SEQ ID NO: 647 - DNA, 21 bp, Artificial Sequence
  Description of Artificial Sequence: Synthetic primer
gctgtgaaaagctatgtatgc

SEQ ID NO: 648 - DNA, 20 bp, Artificial Sequence
  Description of Artificial Sequence: Synthetic primer
cagcactaggctgtgaaaag

SEQ ID NO: 649 - DNA, 22 bp, Artificial Sequence
  Description of Artificial Sequence: Synthetic primer
ataagataggtctgttggaaag

SEQ ID NO: 650 - DNA, 22 bp, Artificial Sequence
  Description of Artificial Sequence: Synthetic primer
tgatttcttcagccattatcca

SEQ ID NO: 651 - DNA, 22 bp, Artificial Sequence
  Description of Artificial Sequence: Synthetic primer
ttaagcttgcatgaaagaaggt

SEQ ID NO: 652 - DNA, 23 bp, Artificial Sequence
  Description of Artificial Sequence: Synthetic primer
ttatgtcagcagaaaaacagaaa

SEQ ID NO: 653 - DNA, 23 bp, Artificial Sequence
  Description of Artificial Sequence: Synthetic primer
gagttttagttctttgagaaatc

SEQ ID NO: 654 - DNA, 21 bp, Artificial Sequence
  Description of Artificial Sequence: Synthetic primer
ggttgatgccatatctttgct

SEQ ID NO: 655 - DNA, 24 bp, Artificial Sequence
  Description of Artificial Sequence: Synthetic primer
ggtttccataacaagaataacaaa

SEQ ID NO: 656 - DNA, 20 bp, Artificial Sequence
  Description of Artificial Sequence: Synthetic primer
ccgatatcttgccactgcag

SEQ ID NO: 657 - DNA, 23 bp, Artificial Sequence
  Description of Artificial Sequence: Synthetic primer
caaaataggaacacactgagtat

SEQ ID NO: 658 - DNA, 23 bp, Artificial Sequence
  Description of Artificial Sequence: Synthetic primer
ctttcaaacaaaataggaacaca

SEQ ID NO: 659 - DNA, 21 bp, Artificial Sequence
  Description of Artificial Sequence: Synthetic primer
tggcatcatgctctaacttca

SEQ ID NO: 660 - DNA, 21 bp, Artificial Sequence
  Description of Artificial Sequence: Synthetic primer
cctgtcactggatattaaggc

SEQ ID NO: 661 - DNA, 23 bp, Artificial Sequence
  Description of Artificial Sequence: Synthetic primer
catttagatctcttcagtgttta

SEQ ID NO: 662 - DNA, 23 bp, Artificial Sequence
  Description of Artificial Sequence: Synthetic primer
ctgaagagatctaaatgaactca

SEQ ID NO: 663 - DNA, 23 bp, Artificial Sequence
  Description of Artificial Sequence: Synthetic primer
caattctgattttgagaatcact

SEQ ID NO: 664 - DNA, 18 bp, Artificial Sequence
  Description of Artificial Sequence: Synthetic primer
gccacaaggaccacccca

SEQ ID NO: 665 - DNA, 21 bp, Artificial Sequence
  Description of Artificial Sequence: Synthetic primer
ccacacaaactcacatacaca

SEQ ID NO: 666 - DNA, 19 bp, Artificial Sequence
  Description of Artificial Sequence: Synthetic primer
aggctgccagcacctttct

SEQ ID NO: 667 - DNA, 22 bp, Artificial Sequence
  Description of Artificial Sequence: Synthetic primer
gcacacatatatgagagaaagg

SEQ ID NO: 668 - DNA, 21 bp, Artificial Sequence
  Description of Artificial Sequence: Synthetic primer
gtgatacctagaaattccctg

SEQ ID NO: 669 - DNA, 19 bp, Artificial Sequence
  Description of Artificial Sequence: Synthetic primer
cgtctccctttcacccacc

SEQ ID NO: 670 - DNA, 21 bp, Artificial Sequence
  Description of Artificial Sequence: Synthetic primer
tgccaggaaagatgaacattg

SEQ ID NO: 671 - DNA, 18 bp, Artificial Sequence
  Description of Artificial Sequence: Synthetic primer
cagtcatggtggcgaggg

SEQ ID NO: 672 - DNA, 23 bp, Artificial Sequence
  Description of Artificial Sequence: Synthetic primer
gccatgtgacttaatttctttag

SEQ ID NO: 673 - DNA, 21 bp, Artificial Sequence
  Description of Artificial Sequence: Synthetic primer
tcctcatttactacagtgacc

SEQ ID NO: 674 - DNA, 19 bp, Artificial Sequence
  Description of Artificial Sequence: Synthetic primer
gcccactttccccctttct

SEQ ID NO: 675 - DNA, 22 bp, Artificial Sequence
  Description of Artificial Sequence: Synthetic primer
actgttatttctggtttctggt

SEQ ID NO: 676 - DNA, 22 bp, Artificial Sequence
  Description of Artificial Sequence: Synthetic primer
acagcaaagagcataaacctac

SEQ ID NO: 677 - DNA, 22 bp, Artificial Sequence
  Description of Artificial Sequence: Synthetic primer
ctcagaatgcatgaatagtaca

SEQ ID NO: 678 - DNA, 22 bp, Artificial Sequence
  Description of Artificial Sequence: Synthetic primer
cgtactatttcttcaagcttca

SEQ ID NO: 679 - DNA, 20 bp, Artificial Sequence
  Description of Artificial Sequence: Synthetic primer
tagggtatccctcttggtca

SEQ ID NO: 680 - DNA, 21 bp, Artificial Sequence
  Description of Artificial Sequence: Synthetic primer
ctgtgtaaccttgatcttggg

SEQ ID NO: 681 - DNA, 22 bp, Artificial Sequence
  Description of Artificial Sequence: Synthetic primer
caatcgcaagtttaaggtaaca

SEQ ID NO: 682 - DNA, 21 bp, Artificial Sequence
  Description of Artificial Sequence: Synthetic primer
ccacacaaactcacatacaca

SEQ ID NO: 683 - DNA, 18 bp, Artificial Sequence
  Description of Artificial Sequence: Synthetic primer
gccacaaggaccacccca

SEQ ID NO: 684 - DNA, 23 bp, Artificial Sequence
  Description of Artificial Sequence: Synthetic primer
catttagatctcttcagtgttta

SEQ ID NO: 685 - DNA, 20 bp, Artificial Sequence
  Description of Artificial Sequence: Synthetic primer
ctcccaaagccatgggattc

SEQ ID NO: 686 - DNA, 20 bp, Artificial Sequence
  Description of Artificial Sequence: Synthetic primer
cctaaccctcttctggaaaa

SEQ ID NO: 687 - DNA, 20 bp, Artificial Sequence
  Description of Artificial Sequence: Synthetic primer
accagaacaggacgaattag

SEQ ID NO: 688 - DNA, 21 bp, Artificial Sequence
  Description of Artificial Sequence: Synthetic primer
gttctagccttactgagatag

SEQ ID NO: 689 - DNA, 20 bp, Artificial Sequence
  Description of Artificial Sequence: Synthetic primer
aaagatcgcttgaaactggg

SEQ ID NO: 690 - DNA, 20 bp, Artificial Sequence
  Description of Artificial Sequence: Synthetic primer
tgaccaggctggtctaaaac

SEQ ID NO: 691 - DNA, 20 bp, Artificial Sequence
  Description of Artificial Sequence: Synthetic primer
gagatctagcaatcctcctg

SEQ ID NO: 692 - DNA, 20 bp, Artificial Sequence
  Description of Artificial Sequence: Synthetic primer
tcattgtgttacagatgctc

SEQ ID NO: 693 - DNA, 20 bp, Artificial Sequence
  Description of Artificial Sequence: Synthetic primer
aaatctgcagacaaggacag

SEQ ID NO: 694 - DNA, 20 bp, Artificial Sequence
  Description of Artificial Sequence: Synthetic primer
atgcacaaatgacagtaggg

SEQ ID NO: 695 - DNA, 20 bp, Artificial Sequence
  Description of Artificial Sequence: Synthetic primer
atgcacaaatgacagtaggg

SEQ ID NO: 696 - DNA, 20 bp, Artificial Sequence
  Description of Artificial Sequence: Synthetic primer
ccacaggaactatttgctgg

SEQ ID NO: 697 - DNA, 20 bp, Artificial Sequence
  Description of Artificial Sequence: Synthetic primer
cccagcatccttgctaatac

SEQ ID NO: 698 - DNA, 20 bp, Artificial Sequence
  Description of Artificial Sequence: Synthetic primer
tgggagaactgggaaaatgg

SEQ ID NO: 699 - DNA, 20 bp, Artificial Sequence
  Description of Artificial Sequence: Synthetic primer
atcctgtactgcacttcagc

SEQ ID NO: 700 - DNA, 20 bp, Artificial Sequence
  Description of Artificial Sequence: Synthetic primer
ttttctgtagtttcccgagc

SEQ ID NO: 701 - DNA, 20 bp, Artificial Sequence
  Description of Artificial Sequence: Synthetic primer
ggaacaaatgaagatagatg

SEQ ID NO: 702 - DNA, 20 bp, Artificial Sequence
  Description of Artificial Sequence: Synthetic primer
tagaatagtttctcagtgtc

SEQ ID NO: 703 - DNA, 20 bp, Artificial Sequence
  Description of Artificial Sequence: Synthetic primer
cataactcaggcaaaacaac

SEQ ID NO: 704 - DNA, 20 bp, Artificial Sequence
  Description of Artificial Sequence: Synthetic primer
tggagcccactcagatattc

SEQ ID NO: 705 - DNA, 20 bp, Artificial Sequence
  Description of Artificial Sequence: Synthetic primer
ccatatacttacctttactg

SEQ ID NO: 706 - DNA, 20 bp, Artificial Sequence
  Description of Artificial Sequence: Synthetic primer
ccatgctggcttttgtgaac

SEQ ID NO: 707 - DNA, 20 bp, Artificial Sequence
  Description of Artificial Sequence: Synthetic primer
caaagaatgagagggaaggc

SEQ ID NO: 708 - DNA, 20 bp, Artificial Sequence
  Description of Artificial Sequence: Synthetic primer
aataaagaggacagcaggag

SEQ ID NO: 709 - DNA, 20 bp, Artificial Sequence
  Description of Artificial Sequence: Synthetic primer
gaatgaatgcagtgtgccag

SEQ ID NO: 710 - DNA, 20 bp, Artificial Sequence
  Description of Artificial Sequence: Synthetic primer
ttatttaggaagcactcagc

SEQ ID NO: 711 - DNA, 20 bp, Artificial Sequence
  Description of Artificial Sequence: Synthetic primer
ttcacctttctgtgttctcc

SEQ ID NO: 712 - DNA, 21 bp, Artificial Sequence
  Description of Artificial Sequence: Synthetic primer
cattaagtgaagagctattcc

SEQ ID NO: 713 - DNA, 20 bp, Artificial Sequence
  Description of Artificial Sequence: Synthetic primer
tttaagctccccaaaaggtg

SEQ ID NO: 714 - DNA, 20 bp, Artificial Sequence
  Description of Artificial Sequence: Synthetic primer
aggtcttatctcttggaatg

SEQ ID NO: 715 - DNA, 20 bp, Artificial Sequence
  Description of Artificial Sequence: Synthetic primer
cattcagacctgtgacagga

SEQ ID NO: 716 - DNA, 21 bp, Artificial Sequence
  Description of Artificial Sequence: Synthetic primer
ctagtgattctgtgaatgttg

SEQ ID NO: 717 - DNA, 21 bp, Artificial Sequence
  Description of Artificial Sequence: Synthetic primer
cagttaacactccatatccac

SEQ ID NO: 718 - DNA, 20 bp, Artificial Sequence
  Description of Artificial Sequence: Synthetic primer
aatttcaagatcagagatcc

SEQ ID NO: 719 - DNA, 20 bp, Artificial Sequence
  Description of Artificial Sequence: Synthetic primer
atacacctatgctaagaagc

SEQ ID NO: 720 - DNA, 20 bp, Artificial Sequence
  Description of Artificial Sequence: Synthetic primer
acacatcatagttttactgc

SEQ ID NO: 721 - DNA, 20 bp, Artificial Sequence
  Description of Artificial Sequence: Synthetic primer
gctagcctggaatcaaacac

SEQ ID NO: 722 - DNA, 20 bp, Artificial Sequence
  Description of Artificial Sequence: Synthetic primer
tttggctgcaatcaaccatg

SEQ ID NO: 723 - DNA, 20 bp, Artificial Sequence
  Description of Artificial Sequence: Synthetic primer
ccttgaaagcatgctaaggg

SEQ ID NO: 724 - DNA, 20 bp, Artificial Sequence
  Description of Artificial Sequence: Synthetic primer
tggattgtgcactttggatg

SEQ ID NO: 725 - DNA, 20 bp, Artificial Sequence
  Description of Artificial Sequence: Synthetic primer
tgcacagactgttaagggag

SEQ ID NO: 726 - DNA, 20 bp, Artificial Sequence
  Description of Artificial Sequence: Synthetic primer
tgagccaagtatggaaaaac

SEQ ID NO: 727 - DNA, 20 bp, Artificial Sequence
  Description of Artificial Sequence: Synthetic primer
atgctcttggagctcagaag

SEQ ID NO: 728 - DNA, 20 bp, Artificial Sequence
  Description of Artificial Sequence: Synthetic primer
gtcaaaacctcttactgtgc

SEQ ID NO: 729 - DNA, 20 bp, Artificial Sequence
  Description of Artificial Sequence: Synthetic primer
actgaaattccttgctgaac

SEQ ID NO: 730 - DNA, 20 bp, Artificial Sequence
  Description of Artificial Sequence: Synthetic primer
aaaacagtgaaagaccttgc

SEQ ID NO: 731 - DNA, 20 bp, Artificial Sequence
  Description of Artificial Sequence: Synthetic primer
actgataaaacaaaggaggg

SEQ ID NO: 732 - DNA, 20 bp, Artificial Sequence
  Description of Artificial Sequence: Synthetic primer
tttctcagcatatgttccag

SEQ ID NO: 733 - DNA, 20 bp, Artificial Sequence
  Description of Artificial Sequence: Synthetic primer
ctgcctagatgaaacaaatg

SEQ ID NO: 734 - DNA, 20 bp, Artificial Sequence
  Description of Artificial Sequence: Synthetic primer
aaggtgcatccctcagaaag

SEQ ID NO: 735 - DNA, 20 bp, Artificial Sequence
  Description of Artificial Sequence: Synthetic primer
ctgaaatagtgagggtagtg

SEQ ID NO: 736 - DNA, 20 bp, Artificial Sequence
  Description of Artificial Sequence: Synthetic primer
aaaagggaagggaagtgtgg

SEQ ID NO: 737 - DNA, 20 bp, Artificial Sequence
  Description of Artificial Sequence: Synthetic primer
tttatcagcaagcatgtgag

SEQ ID NO: 738 - DNA, 20 bp, Artificial Sequence
  Description of Artificial Sequence: Synthetic primer
tagtgcatgagaaagtctac

SEQ ID NO: 739 - DNA, 21 bp, Artificial Sequence
  Description of Artificial Sequence: Synthetic primer
gtttaacagcaaccattgagg

SEQ ID NO: 740 - DNA, 20 bp, Artificial Sequence
  Description of Artificial Sequence: Synthetic primer
tggaagagtattaacttctg

SEQ ID NO: 741 - DNA, 20 bp, Artificial Sequence
  Description of Artificial Sequence: Synthetic primer
actcttccaaagactgatgc

SEQ ID NO: 742 - DNA, 20 bp, Artificial Sequence
  Description of Artificial Sequence: Synthetic primer
ttgcctcttccagtctattg

SEQ ID NO: 743 - DNA, 20 bp, Artificial Sequence
  Description of Artificial Sequence: Synthetic primer
agagacagaagagacactag

SEQ ID NO: 744 - DNA, 20 bp, Artificial Sequence
  Description of Artificial Sequence: Synthetic primer
gagaagaaggcatatgtgag

SEQ ID NO: 745 - DNA, 20 bp, Artificial Sequence
  Description of Artificial Sequence: Synthetic primer
tggtgatgataggtgctgtg

SEQ ID NO: 746 - DNA, 20 bp, Artificial Sequence
  Description of Artificial Sequence: Synthetic primer
cttctctccatgaaactcag

SEQ ID NO: 747 - DNA, 20 bp, Artificial Sequence
  Description of Artificial Sequence: Synthetic primer
ctccattatctgtttgcagt

SEQ ID NO: 748 - DNA, 20 bp, Artificial Sequence
  Description of Artificial Sequence: Synthetic primer
ctgttccttgtttcttctgc

SEQ ID NO: 749 - DNA, 20 bp, Artificial Sequence
  Description of Artificial Sequence: Synthetic primer
aggagagaagtctatgtccc

SEQ ID NO: 750 - DNA, 20 bp, Artificial Sequence
  Description of Artificial Sequence: Synthetic primer
ggatggactattgttttctt

SEQ ID NO: 751 - DNA, 20 bp, Artificial Sequence
  Description of Artificial Sequence: Synthetic primer
tcactgcttagaaactaatc

SEQ ID NO: 752 - DNA, 20 bp, Artificial Sequence
  Description of Artificial Sequence: Synthetic primer
aaactgaagcagattctgac

SEQ ID NO: 753 - DNA, 20 bp, Artificial Sequence
  Description of Artificial Sequence: Synthetic primer
gctaattttcctaggatctc

SEQ ID NO: 754 - DNA, 20 bp, Artificial Sequence
  Description of Artificial Sequence: Synthetic primer
ctaagcctaataaaggaggg

SEQ ID NO: 755 - DNA, 20 bp, Artificial Sequence
  Description of Artificial Sequence: Synthetic primer
caataatgacatgctcttac

SEQ ID NO: 756 - DNA, 20 bp, Artificial Sequence
  Description of Artificial Sequence: Synthetic primer
atgatggagctccagaaaag

SEQ ID NO: 757 - DNA, 20 bp, Artificial Sequence
  Description of Artificial Sequence: Synthetic primer
ttcagagctcactttccaac

SEQ ID NO: 758 - DNA, 20 bp, Artificial Sequence
  Description of Artificial Sequence: Synthetic primer
gacactgaatccatagatcg

SEQ ID NO: 759 - DNA, 20 bp, Artificial Sequence
  Description of Artificial Sequence: Synthetic primer
cctcatgctttaataggtag

SEQ ID NO: 760 - DNA, 20 bp, Artificial Sequence
  Description of Artificial Sequence: Synthetic primer
aaattaggctgaaggaacag

SEQ ID NO: 761 - DNA, 20 bp, Artificial Sequence
  Description of Artificial Sequence: Synthetic primer
cgtttccaccacctggaaat

SEQ ID NO: 762 - DNA, 21 bp, Artificial Sequence
  Description of Artificial Sequence: Synthetic primer
ccttgagtatctaagaaaggc

SEQ ID NO: 763 - DNA, 20 bp, Artificial Sequence
  Description of Artificial Sequence: Synthetic primer
tcaagagtggaaagggagag

SEQ ID NO: 764 - DNA, 20 bp, Artificial Sequence
  Description of Artificial Sequence: Synthetic primer
tggcctcaaatgcatgtgtc

SEQ ID NO: 765 - DNA, 20 bp, Artificial Sequence
  Description of Artificial Sequence: Synthetic primer
gtgtttgagaaagaagtgtg

SEQ ID NO: 766 - DNA, 20 bp, Artificial Sequence
  Description of Artificial Sequence: Synthetic primer
gtaggcctgagaatgcattg

SEQ ID NO: 767 - DNA, 20 bp, Artificial Sequence
  Description of Artificial Sequence: Synthetic primer
atgagaacacatggacacgg

SEQ ID NO: 768 - DNA, 20 bp, Artificial Sequence
  Description of Artificial Sequence: Synthetic primer
gattggaaaagggcaacagg

SEQ ID NO: 769 - DNA, 20 bp, Artificial Sequence
  Description of Artificial Sequence: Synthetic primer
aaaggatgtttccatttctc

SEQ ID NO: 770 - DNA, 21 bp, Artificial Sequence
  Description of Artificial Sequence: Synthetic primer
ctcaggatcattgagacttag

SEQ ID NO: 771 - DNA, 20 bp, Artificial Sequence
  Description of Artificial Sequence: Synthetic primer
tgcccaaactgcaaatacac

SEQ ID NO: 772 - DNA, 20 bp, Artificial Sequence
  Description of Artificial Sequence: Synthetic primer
ctacaacagacaaggatggg

SEQ ID NO: 773 - DNA, 20 bp, Artificial Sequence
  Description of Artificial Sequence: Synthetic primer
ccatttctaatgggtacctc

SEQ ID NO: 774 - DNA, 20 bp, Artificial Sequence
  Description of Artificial Sequence: Synthetic primer
attttcacattgctttgccc

SEQ ID NO: 775 - DNA, 21 bp, Artificial Sequence
  Description of Artificial Sequence: Synthetic primer
caatctcaaaacagtgtttac

SEQ ID NO: 776 - DNA, 20 bp, Artificial Sequence
  Description of Artificial Sequence: Synthetic primer
ctggctggaatgttaatagg

SEQ ID NO: 777 - DNA, 20 bp, Artificial Sequence
  Description of Artificial Sequence: Synthetic primer
cctgcaggaagaaaataggc

SEQ ID NO: 778 - DNA, 20 bp, Artificial Sequence
  Description of Artificial Sequence: Synthetic primer
gggaattactctagctcttc

SEQ ID NO: 779 - DNA, 20 bp, Artificial Sequence
  Description of Artificial Sequence: Synthetic primer
tcaaactagtagcccacaaa

SEQ ID NO: 780 - DNA, 20 bp, Artificial Sequence
  Description of Artificial Sequence: Synthetic primer
ccatctttttgtctgcattc

SEQ ID NO: 781 - DNA, 20 bp, Artificial Sequence
  Description of Artificial Sequence: Synthetic primer
gcatggctcttaggagaaag

SEQ ID NO: 782 - DNA, 20 bp, Artificial Sequence
  Description of Artificial Sequence: Synthetic primer
ttgttttcctaggctccagc

SEQ ID NO: 783 - DNA, 22 bp, Artificial Sequence
  Description of Artificial Sequence: Synthetic primer
gcaagttcattttcatatagcg

SEQ ID NO: 784 - DNA, 21 bp, Artificial Sequence
  Description of Artificial Sequence: Synthetic primer
cacacatagctcttctgtaag

SEQ ID NO: 785 - DNA, 20 bp, Artificial Sequence
  Description of Artificial Sequence: Synthetic primer
aagggataacaagacaaatg

SEQ ID NO: 786 - DNA, 20 bp, Artificial Sequence
  Description of Artificial Sequence: Synthetic primer
cagttactccaaacttacgg

SEQ ID NO: 787 - DNA, 20 bp, Artificial Sequence
  Description of Artificial Sequence: Synthetic primer
gctctcagtgtcttttaatg

SEQ ID NO: 788 - DNA, 21 bp, Artificial Sequence
  Description of Artificial Sequence: Synthetic primer
gggtttataagccttttcttc

SEQ ID NO: 789 - DNA, 21 bp, Artificial Sequence
  Description of Artificial Sequence: Synthetic primer
gttgtcattttatgtcctccg

SEQ ID NO: 790 - DNA, 20 bp, Artificial Sequence
  Description of Artificial Sequence: Synthetic primer
gaggacttcaatgactttgc

SEQ ID NO: 791 - DNA, 20 bp, Artificial Sequence
  Description of Artificial Sequence: Synthetic primer
caggaatgcaatctaaggcc

SEQ ID NO: 792 - DNA, 21 bp, Artificial Sequence
  Description of Artificial Sequence: Synthetic primer
gacctataaagacaggaatgc

SEQ ID NO: 793 - DNA, 20 bp, Artificial Sequence
  Description of Artificial Sequence: Synthetic primer
ccccaatgttatgcatactc

SEQ ID NO: 794 - DNA, 21 bp, Artificial Sequence
  Description of Artificial Sequence: Synthetic primer
gcttaaagaccttcaaactac

SEQ ID NO: 795 - DNA, 20 bp, Artificial Sequence
  Description of Artificial Sequence: Synthetic primer
ttgctctgttgtcaaggctg

SEQ ID NO: 796 - DNA, 20 bp, Artificial Sequence
  Description of Artificial Sequence: Synthetic primer
taatcccagcagtttgggag

SEQ ID NO: 797 - DNA, 20 bp, Artificial Sequence
  Description of Artificial Sequence: Synthetic primer
gaaacctaattttgagcctg

SEQ ID NO: 798 - DNA, 21 bp, Artificial Sequence
  Description of Artificial Sequence: Synthetic primer
ccaggctcaaaattaggtttc

SEQ ID NO: 799 - DNA, 20 bp, Artificial Sequence
  Description of Artificial Sequence: Synthetic primer
agcaacctggttttaagagc

SEQ ID NO: 800 - DNA, 20 bp, Artificial Sequence
  Description of Artificial Sequence: Synthetic primer
ggacattgtagtagtcaggg

SEQ ID NO: 801 - DNA, 20 bp, Artificial Sequence
  Description of Artificial Sequence: Synthetic primer
ggacattgtagtagtcaggg

SEQ ID NO: 802 - DNA, 20 bp, Artificial Sequence
  Description of Artificial Sequence: Synthetic primer
ggaacagcacaagcaaaaac

SEQ ID NO: 803 - DNA, 20 bp, Artificial Sequence
  Description of Artificial Sequence: Synthetic primer
cctgtcaagatgcataggag

SEQ ID NO: 804 - DNA, 20 bp, Artificial Sequence
  Description of Artificial Sequence: Synthetic primer
tgctacatactgtagcagcc

SEQ ID NO: 805 - DNA, 20 bp, Artificial Sequence
  Description of Artificial Sequence: Synthetic primer
accctccatgggagtttttc

SEQ ID NO: 806 - DNA, 20 bp, Artificial Sequence
  Description of Artificial Sequence: Synthetic primer
aatgcaatccacagagcaag

SEQ ID NO: 807 - DNA, 21 bp, Artificial Sequence
  Description of Artificial Sequence: Synthetic primer
ggacctatgttttatgagttc

SEQ ID NO: 808 - DNA, 21 bp, Artificial Sequence
  Description of Artificial Sequence: Synthetic primer
gaactcataaaacataggtcc

SEQ ID NO: 809 - DNA, 21 bp, Artificial Sequence
  Description of Artificial Sequence: Synthetic primer
gttgaaaaagctctatattgg

SEQ ID NO: 810 - DNA, 20 bp, Artificial Sequence
  Description of Artificial Sequence: Synthetic primer
ccctggaacatgtaaatgtg

SEQ ID NO: 811 - DNA, 20 bp, Artificial Sequence
  Description of Artificial Sequence: Synthetic primer
aatgtgagttctgaagatgg

SEQ ID NO: 812 - DNA, 20 bp, Artificial Sequence
  Description of Artificial Sequence: Synthetic primer
tcctgacccttagtccaatg

SEQ ID NO: 813 - DNA, 20 bp, Artificial Sequence
  Description of Artificial Sequence: Synthetic primer
tgtggcctaccagaatttgc

SEQ ID NO: 814 - DNA, 20 bp, Artificial Sequence
  Description of Artificial Sequence: Synthetic primer
cacagttgtactcctagctc

SEQ ID NO: 815 - DNA, 20 bp, Artificial Sequence
  Description of Artificial Sequence: Synthetic primer
tgaacctatcttgcaggtgg

SEQ ID NO: 816 - DNA, 21 bp, Artificial Sequence
  Description of Artificial Sequence: Synthetic primer
gagtccaagactagtaaagag

SEQ ID NO: 817 - DNA, 20 bp, Artificial Sequence
  Description of Artificial Sequence: Synthetic primer
aagaagaagaacaactgtac

SEQ ID NO: 818 - DNA, 21 bp, Artificial Sequence
  Description of Artificial Sequence: Synthetic primer
cttaaaagctattcgttaagc

SEQ ID NO: 819 - DNA, 20 bp, Artificial Sequence
  Description of Artificial Sequence: Synthetic primer
tactgtgacattcccttctc

SEQ ID NO: 820 - DNA, 21 bp, Artificial Sequence
  Description of Artificial Sequence: Synthetic primer
cccattcagatatatagacag

SEQ ID NO: 821 - DNA, 20 bp, Artificial Sequence
  Description of Artificial Sequence: Synthetic primer
tgatgggactgttcttcagg

SEQ ID NO: 822 - DNA, 20 bp, Artificial Sequence
  Description of Artificial Sequence: Synthetic primer
caatgtgattgtgttggaag

SEQ ID NO: 823 - DNA, 20 bp, Artificial Sequence
  Description of Artificial Sequence: Synthetic primer
gagcctcagtttgttgaatc

SEQ ID NO: 824 - DNA, 20 bp, Artificial Sequence
  Description of Artificial Sequence: Synthetic primer
cctaacatgagtccattctg

SEQ ID NO: 825 - DNA, 21 bp, Artificial Sequence
  Description of Artificial Sequence: Synthetic primer
gcagaaaaactagtacgatac

SEQ ID NO: 826 - DNA, 20 bp, Artificial Sequence
  Description of Artificial Sequence: Synthetic primer
ggatgaaactatgtgaaagc

SEQ ID NO: 827 - DNA, 20 bp, Artificial Sequence
  Description of Artificial Sequence: Synthetic primer
ccgaaaacaaaagcaccctg

SEQ ID NO: 828 - DNA, 20 bp, Artificial Sequence
  Description of Artificial Sequence: Synthetic primer
atcccaagagaaatgaaaac

SEQ ID NO: 829 - DNA, 20 bp, Artificial Sequence
  Description of Artificial Sequence: Synthetic primer
tgagtccctatagatttgtc

SEQ ID NO: 830 - DNA, 20 bp, Artificial Sequence
  Description of Artificial Sequence: Synthetic primer
accagactctctctttttta

SEQ ID NO: 831 - DNA, 20 bp, Artificial Sequence
  Description of Artificial Sequence: Synthetic primer
tcatcctttaagccttgccg

SEQ ID NO: 832 - DNA, 20 bp, Artificial Sequence
  Description of Artificial Sequence: Synthetic primer
ctgggataattgttgggatc

SEQ ID NO: 833 - DNA, 20 bp, Artificial Sequence
  Description of Artificial Sequence: Synthetic primer
acatatttccctgacctccc

SEQ ID NO: 834 - DNA, 20 bp, Artificial Sequence
  Description of Artificial Sequence: Synthetic primer
catggcagccttaccaaaga

SEQ ID NO: 835 - DNA, 20 bp, Artificial Sequence
  Description of Artificial Sequence: Synthetic primer
tctccaggtaaacttccaag

SEQ ID NO: 836 - DNA, 20 bp, Artificial Sequence
  Description of Artificial Sequence: Synthetic primer
tattgaggccgagtagtctg

SEQ ID NO: 837 - DNA, 20 bp, Artificial Sequence
  Description of Artificial Sequence: Synthetic primer
gaaagcaaggtctttcactg

SEQ ID NO: 838 - DNA, 20 bp, Artificial Sequence
  Description of Artificial Sequence: Synthetic primer
atcagtctcagggaagatgc

SEQ ID NO: 839 - DNA, 20 bp, Artificial Sequence
  Description of Artificial Sequence: Synthetic primer
ctgctggaacatatgctgag

SEQ ID NO: 840 - DNA, 20 bp, Artificial Sequence
  Description of Artificial Sequence: Synthetic primer
gcctggctgatctaaggttt

SEQ ID NO: 841 - DNA, 20 bp, Artificial Sequence
  Description of Artificial Sequence: Synthetic primer
aagatgtggagagaacaagg

SEQ ID NO: 842 - DNA, 20 bp, Artificial Sequence
  Description of Artificial Sequence: Synthetic primer
actctcctccaagagctttc

SEQ ID NO: 843 - DNA, 21 bp, Artificial Sequence
  Description of Artificial Sequence: Synthetic primer
gttttctggaaaacttttacc

SEQ ID NO: 844 - DNA, 20 bp, Artificial Sequence
  Description of Artificial Sequence: Synthetic primer
ttgcttatctgactggcaag

SEQ ID NO: 845 - DNA, 20 bp, Artificial Sequence
  Description of Artificial Sequence: Synthetic primer
ccccaaaggtatgttaagag

SEQ ID NO: 846 - DNA, 20 bp, Artificial Sequence
  Description of Artificial Sequence: Synthetic primer
ttagtctattgattgaaagc

SEQ ID NO: 847 - DNA, 20 bp, Artificial Sequence
  Description of Artificial Sequence: Synthetic primer
ggatgtggggttataagaac

SEQ ID NO: 848 - DNA, 20 bp, Artificial Sequence
  Description of Artificial Sequence: Synthetic primer
cagaggagagacatgatcag

SEQ ID NO: 849 - DNA, 20 bp, Artificial Sequence
  Description of Artificial Sequence: Synthetic primer
ccccatccaaatacattgcc

SEQ ID NO: 850 - DNA, 20 bp, Artificial Sequence
  Description of Artificial Sequence: Synthetic primer
ctcactctttcttctgtctg

SEQ ID NO: 851 - DNA, 20 bp, Artificial Sequence
  Description of Artificial Sequence: Synthetic primer
acacaggtgctttctaattg

SEQ ID NO: 852 - DNA, 20 bp, Artificial Sequence
  Description of Artificial Sequence: Synthetic primer
aggagatatcaagacaccag

SEQ ID NO: 853 - DNA, 20 bp, Artificial Sequence
  Description of Artificial Sequence: Synthetic primer
ctctgagtagtgttttctgg

SEQ ID NO: 854 - DNA, 20 bp, Artificial Sequence
  Description of Artificial Sequence: Synthetic primer
gtggtgtttgccattaaaag

SEQ ID NO: 855 - DNA, 20 bp, Artificial Sequence
  Description of Artificial Sequence: Synthetic primer
ttcttacattctagagcctt

SEQ ID NO: 856 - DNA, 21 bp, Artificial Sequence
  Description of Artificial Sequence: Synthetic primer
cctatcttgattagattacag

SEQ ID NO: 857 - DNA, 20 bp, Artificial Sequence
  Description of Artificial Sequence: Synthetic primer
aaacacctttctgagaattg

SEQ ID NO: 858 - DNA, 21 bp, Artificial Sequence
  Description of Artificial Sequence: Synthetic primer
ctttgttctttcaattctcag

SEQ ID NO: 859 - DNA, 20 bp, Artificial Sequence
  Description of Artificial Sequence: Synthetic primer
agtgagccccaaaatctgtg

SEQ ID NO: 860 - DNA, 20 bp, Artificial Sequence
  Description of Artificial Sequence: Synthetic primer
atatatagaaaagactggag

SEQ ID NO: 861 - DNA, 21 bp, Artificial Sequence
  Description of Artificial Sequence: Synthetic primer
cgtatagcaatcatacacaag

SEQ ID NO: 862 - DNA, 20 bp, Artificial Sequence
  Description of Artificial Sequence: Synthetic primer
cagagatatttagtggcaac

SEQ ID NO: 863 - DNA, 20 bp, Artificial Sequence
  Description of Artificial Sequence: Synthetic primer
ggggctaccaaacttaaaag

SEQ ID NO: 864 - DNA, 21 bp, Artificial Sequence
  Description of Artificial Sequence: Synthetic primer
cctttttaaataaccagtgac

SEQ ID NO: 865 - DNA, 21 bp, Artificial Sequence
  Description of Artificial Sequence: Synthetic primer
cacacatttctatagtacttg

SEQ ID NO: 866 - DNA, 21 bp, Artificial Sequence
  Description of Artificial Sequence: Synthetic primer
gcttgatggttattacaatgg

SEQ ID NO: 867 - DNA, 20 bp, Artificial Sequence
  Description of Artificial Sequence: Synthetic primer
ctggctttcttccattgttg

SEQ ID NO: 868 - DNA, 20 bp, Artificial Sequence
  Description of Artificial Sequence: Synthetic primer
aaaatatacttgttttgagc

SEQ ID NO: 869 - DNA, 20 bp, Artificial Sequence
  Description of Artificial Sequence: Synthetic primer
cagctccactcactatcttg

SEQ ID NO: 870 - DNA, 20 bp, Artificial Sequence
  Description of Artificial Sequence: Synthetic primer
ctttggagctatccaaatgg

SEQ ID NO: 871 - DNA, 20 bp, Artificial Sequence
  Description of Artificial Sequence: Synthetic primer
gagttcagacagagtatgag

SEQ ID NO: 872 - DNA, 20 bp, Artificial Sequence
  Description of Artificial Sequence: Synthetic primer
gacattccattattcctccc

SEQ ID NO: 873 - DNA, 20 bp, Artificial Sequence
  Description of Artificial Sequence: Synthetic primer
tctcctaatgctatccctcc

SEQ ID NO: 874 - DNA, 20 bp, Artificial Sequence
  Description of Artificial Sequence: Synthetic primer
tccatgagaatgttcctcag

SEQ ID NO: 875 - DNA, 20 bp, Artificial Sequence
  Description of Artificial Sequence: Synthetic primer
cctagaaaggtagttgatgc

SEQ ID NO: 876 - DNA, 20 bp, Artificial Sequence
  Description of Artificial Sequence: Synthetic primer
cttgaaagataactgcggac

SEQ ID NO: 877 - DNA, 21 bp, Artificial Sequence
  Description of Artificial Sequence: Synthetic primer
gctacattaagtgaattctac

SEQ ID NO: 878 - DNA, 20 bp, Artificial Sequence
  Description of Artificial Sequence: Synthetic primer
caatgccttcagcattttcc

SEQ ID NO: 879 - DNA, 20 bp, Artificial Sequence
  Description of Artificial Sequence: Synthetic primer
tgccatacactacaacagac

SEQ ID NO: 880 - DNA, 20 bp, Artificial Sequence
  Description of Artificial Sequence: Synthetic primer
gaacaagcagagcaagtaag

SEQ ID NO: 881 - DNA, 20 bp, Artificial Sequence
  Description of Artificial Sequence: Synthetic primer
actaagaaaggagagaacag

SEQ ID NO: 882 - DNA, 20 bp, Artificial Sequence
  Description of Artificial Sequence: Synthetic primer
tgtgctcctcagtacatagc

SEQ ID NO: 883 - DNA, 20 bp, Artificial Sequence
  Description of Artificial Sequence: Synthetic primer
agggaagcaaaactaagatg

SEQ ID NO: 884 - DNA, 20 bp, Artificial Sequence
  Description of Artificial Sequence: Synthetic primer
aggaaagagtaggccaaatg

SEQ ID NO: 885 - DNA, 21 bp, Artificial Sequence
  Description of Artificial Sequence: Synthetic primer
gtatagattacagtagatgtg

SEQ ID NO: 886 - DNA, 20 bp, Artificial Sequence
  Description of Artificial Sequence: Synthetic primer
cagtcaattttcatattgcc

SEQ ID NO: 887 - DNA, 20 bp, Artificial Sequence
  Description of Artificial Sequence: Synthetic primer
gctggaagggaaaatggtac

SEQ ID NO: 888 - DNA, 20 bp, Artificial Sequence
  Description of Artificial Sequence: Synthetic primer
tggctacaatagggagactg

SEQ ID NO: 889 - DNA, 20 bp, Artificial Sequence
  Description of Artificial Sequence: Synthetic primer
taaaacagtgtgaaattttg

SEQ ID NO: 890 - DNA, 21 bp, Artificial Sequence
  Description of Artificial Sequence: Synthetic primer
gcctcgaggaaaaaaaaatag

SEQ ID NO: 891 - DNA, 20 bp, Artificial Sequence
  Description of Artificial Sequence: Synthetic primer
accccatgatctactatttc

SEQ ID NO: 892 - DNA, 20 bp, Artificial Sequence
  Description of Artificial Sequence: Synthetic primer
ggtaacaaaggcactcaagg

SEQ ID NO: 893 - DNA, 20 bp, Artificial Sequence
  Description of Artificial Sequence: Synthetic primer
cgcatatgattagctacttc

SEQ ID NO: 894 - DNA, 21 bp, Artificial Sequence
  Description of Artificial Sequence: Synthetic primer
cttgctaacaatgaaaaggtg

SEQ ID NO: 895 - DNA, 20 bp, Artificial Sequence
  Description of Artificial Sequence: Synthetic primer
tagagtcactgccaataaac

SEQ ID NO: 896 - DNA, 20 bp, Artificial Sequence
  Description of Artificial Sequence: Synthetic primer
tcagacacaaacatctgaag

SEQ ID NO: 897 - DNA, 17 bp, Artificial Sequence
  Description of Artificial Sequence: Synthetic primer
catgggattccaggtgt

SEQ ID NO: 898 - DNA, 20 bp, Artificial Sequence
  Description of Artificial Sequence: Synthetic primer
cctcttctggaaaatcttaa

SEQ ID NO: 899 - DNA, 17 bp, Artificial Sequence
  Description of Artificial Sequence: Synthetic primer
acgaattagtccaagga

SEQ ID NO: 900 - DNA, 24 bp, Artificial Sequence
  Description of Artificial Sequence: Synthetic primer
tgagatagttaattttgttttcca

SEQ ID NO: 901 - DNA, 17 bp, Artificial Sequence
  Description of Artificial Sequence: Synthetic primer
cagtgagccatgactgt

SEQ ID NO: 902 - DNA, 19 bp, Artificial Sequence
  Description of Artificial Sequence: Synthetic primer
ggtctaaaactcctgagat

SEQ ID NO: 903 - DNA, 17 bp, Artificial Sequence
  Description of Artificial Sequence: Synthetic primer
ctcctgccttggcctcc

SEQ ID NO: 904 - DNA, 17 bp, Artificial Sequence
  Description of Artificial Sequence: Synthetic primer
gaagagaaagagatggc

SEQ ID NO: 905 - DNA, 23 bp, Artificial Sequence
  Description of Artificial Sequence: Synthetic primer
agggatcggaaatttaagaagaa

SEQ ID NO: 906 - DNA, 23 bp, Artificial Sequence
  Description of Artificial Sequence: Synthetic primer
aatgacagtagggattatagtaa

SEQ ID NO: 907 - DNA, 21 bp, Artificial Sequence
  Description of Artificial Sequence: Synthetic primer
gacagtagggattatagtaag

SEQ ID NO: 908 - DNA, 17 bp, Artificial Sequence
  Description of Artificial Sequence: Synthetic primer
atttgctggccctttaa

SEQ ID NO: 909 - DNA, 17 bp, Artificial Sequence
  Description of Artificial Sequence: Synthetic primer
cctaaagcagccactgt

SEQ ID NO: 910 - DNA, 17 bp, Artificial Sequence
  Description of Artificial Sequence: Synthetic primer
caatgagaaatgccagc

SEQ ID NO: 911 - DNA, 19 bp, Artificial Sequence
  Description of Artificial Sequence: Synthetic primer
gcgatagagtgagattctg

SEQ ID NO: 912 - DNA, 21 bp, Artificial Sequence
  Description of Artificial Sequence: Synthetic primer
tgtagtttcccgagctagatt

SEQ ID NO: 913 - DNA, 21 bp, Artificial Sequence
  Description of Artificial Sequence: Synthetic primer
agatagatgaatggagaaccc

SEQ ID NO: 914 - DNA, 21 bp, Artificial Sequence
  Description of Artificial Sequence: Synthetic primer
gtttctcagtgtcatcaaata

SEQ ID NO: 915 - DNA, 24 bp, Artificial Sequence
  Description of Artificial Sequence: Synthetic primer
aaaaagacatatcttcttttagtg

SEQ ID NO: 916 - DNA, 20 bp, Artificial Sequence
  Description of Artificial Sequence: Synthetic primer
ccactcagatattccataac

SEQ ID NO: 917 - DNA, 24 bp, Artificial Sequence
  Description of Artificial Sequence: Synthetic primer
cctttactgtgatatttatttctt

SEQ ID NO: 918 - DNA, 20 bp, Artificial Sequence
  Description of Artificial Sequence: Synthetic primer
gctcctgaaacatattcatg

SEQ ID NO: 919 - DNA, 20 bp, Artificial Sequence
  Description of Artificial Sequence: Synthetic primer
gaaggcattatgacatgaat

SEQ ID NO: 920 - DNA, 20 bp, Artificial Sequence
  Description of Artificial Sequence: Synthetic primer
ttgtttattcaaatctgcca

SEQ ID NO: 921 - DNA, 21 bp, Artificial Sequence
  Description of Artificial Sequence: Synthetic primer
gccagtaatctctccaatgat

SEQ ID NO: 922 - DNA, 18 bp, Artificial Sequence
  Description of Artificial Sequence: Synthetic primer
cactcagctgaatagaca

SEQ ID NO: 923 - DNA, 19 bp, Artificial Sequence
  Description of Artificial Sequence: Synthetic primer
ctgactcatacatcctttg

SEQ ID NO: 924 - DNA, 18 bp, Artificial Sequence
  Description of Artificial Sequence: Synthetic primer
gagctattccaatgtgct

SEQ ID NO: 925 - DNA, 24 bp, Artificial Sequence
  Description of Artificial Sequence: Synthetic primer
aagctccccaaaaggtgtttaatt

SEQ ID NO: 926 - DNA, 17 bp, Artificial Sequence
  Description of Artificial Sequence: Synthetic primer
tgtacaaatctgagggc

SEQ ID NO: 927 - DNA, 20 bp, Artificial Sequence
  Description of Artificial Sequence: Synthetic primer
cctgtgacaggattccagca

SEQ ID NO: 928 - DNA, 18 bp, Artificial Sequence
  Description of Artificial Sequence: Synthetic primer
ggattacagtagtttccc

SEQ ID NO: 929 - DNA, 17 bp, Artificial Sequence
  Description of Artificial Sequence: Synthetic primer
ccatatccacaggttct

SEQ ID NO: 930 - DNA, 20 bp, Artificial Sequence
  Description of Artificial Sequence: Synthetic primer
cttagccactctgataatct

SEQ ID NO: 931 - DNA, 17 bp, Artificial Sequence
  Description of Artificial Sequence: Synthetic primer
acactgcaaaaagcact

SEQ ID NO: 932 - DNA, 22 bp, Artificial Sequence
  Description of Artificial Sequence: Synthetic primer
tgcagagataatgtatgtagaa

SEQ ID NO: 933 - DNA, 24 bp, Artificial Sequence
  Description of Artificial Sequence: Synthetic primer
tcaaacacagtttatatgagataa

SEQ ID NO: 934 - DNA, 17 bp, Artificial Sequence
  Description of Artificial Sequence: Synthetic primer
caaccatgctgctatga

SEQ ID NO: 935 - DNA, 18 bp, Artificial Sequence
  Description of Artificial Sequence: Synthetic primer
catgctaagggaaagaag

SEQ ID NO: 936 - DNA, 22 bp, Artificial Sequence
  Description of Artificial Sequence: Synthetic primer
ggatgggtgaattgtatattat

SEQ ID NO: 937 - DNA, 18 bp, Artificial Sequence
  Description of Artificial Sequence: Synthetic primer
ttaagggagagcatgaaa

SEQ ID NO: 938 - DNA, 18 bp, Artificial Sequence
  Description of Artificial Sequence: Synthetic primer
ggtagaaatggactttga

SEQ ID NO: 939 - DNA, 18 bp, Artificial Sequence
  Description of Artificial Sequence: Synthetic primer
gcagcttcctaacaaaaa

SEQ ID NO: 940 - DNA, 18 bp, Artificial Sequence
  Description of Artificial Sequence: Synthetic primer
gcctttgaaagaatccaa

SEQ ID NO: 941 - DNA, 20 bp, Artificial Sequence
  Description of Artificial Sequence: Synthetic primer
cttttttgtttctatccagg

SEQ ID NO: 942 - DNA, 17 bp, Artificial Sequence
  Description of Artificial Sequence: Synthetic primer
tgcttctttattcccca

SEQ ID NO: 943 - DNA, 19 bp, Artificial Sequence
  Description of Artificial Sequence: Synthetic primer
gctttgtttttgatgagtg

SEQ ID NO: 944 - DNA, 18 bp, Artificial Sequence
  Description of Artificial Sequence: Synthetic primer
ttaattcctgagacgtgt

SEQ ID NO: 945 - DNA, 23 bp, Artificial Sequence
  Description of Artificial Sequence: Synthetic primer
cttgcaagtgattaaaaaaaaaa

SEQ ID NO: 946 - DNA, 19 bp, Artificial Sequence
  Description of Artificial Sequence: Synthetic primer
gaaagcattcatctcacta

SEQ ID NO: 947 - DNA, 21 bp, Artificial Sequence
  Description of Artificial Sequence: Synthetic primer
gtagtgtctacaaagggtata

SEQ ID NO: 948 - DNA, 17 bp, Artificial Sequence
  Description of Artificial Sequence: Synthetic primer
gttgatctccttcctgg

SEQ ID NO: 949 - DNA, 20 bp, Artificial Sequence
  Description of Artificial Sequence: Synthetic primer
gagaaagtagactttctcat

SEQ ID NO: 950 - DNA, 17 bp, Artificial Sequence
  Description of Artificial Sequence: Synthetic primer
ctttctcacatgcttgc

SEQ ID NO: 951 - DNA, 21 bp, Artificial Sequence
  Description of Artificial Sequence: Synthetic primer
cagcaaccattgagggtgaat

SEQ ID NO: 952 - DNA, 20 bp, Artificial Sequence
  Description of Artificial Sequence: Synthetic primer
tgtccttgactgatttttag

SEQ ID NO: 953 - DNA, 19 bp, Artificial Sequence
  Description of Artificial Sequence: Synthetic primer
tctaggaagtatgagatgg

SEQ ID NO: 954 - DNA, 20 bp, Artificial Sequence
  Description of Artificial Sequence: Synthetic primer
caatagtaactgtcaactgt

SEQ ID NO: 955 - DNA, 17 bp, Artificial Sequence
  Description of Artificial Sequence: Synthetic primer
caaggaagctagagcca

SEQ ID NO: 956 - DNA, 19 bp, Artificial Sequence
  Description of Artificial Sequence: Synthetic primer
cttcaattagaaagcacct

SEQ ID NO: 957 - DNA, 19 bp, Artificial Sequence
  Description of Artificial Sequence: Synthetic primer
gtgctgtgaagagaaatta

SEQ ID NO: 958 - DNA, 17 bp, Artificial Sequence
  Description of Artificial Sequence: Synthetic primer
ggattgtttcttcctct

SEQ ID NO: 959 - DNA, 21 bp, Artificial Sequence
  Description of Artificial Sequence: Synthetic primer
tgtatacagaaaaaagcatga

SEQ ID NO: 960 - DNA, 18 bp, Artificial Sequence
  Description of Artificial Sequence: Synthetic primer
gttggtgcaaaagtaact

SEQ ID NO: 961 - DNA, 17 bp, Artificial Sequence
  Description of Artificial Sequence: Synthetic primer
gtctatgtccctgacac

SEQ ID NO: 962 - DNA, 24 bp, Artificial Sequence
  Description of Artificial Sequence: Synthetic primer
aaaaattaaaacattcactgctta

SEQ ID NO: 963 - DNA, 23 bp, Artificial Sequence
  Description of Artificial Sequence: Synthetic primer
ttctgtaatctaatcaagatagg

SEQ ID NO: 964 - DNA, 18 bp, Artificial Sequence
  Description of Artificial Sequence: Synthetic primer
tctgacaggactaaagaa

SEQ ID NO: 965 - DNA, 20 bp, Artificial Sequence
  Description of Artificial Sequence: Synthetic primer
ggtcagctaaggattttaga

SEQ ID NO: 966 - DNA, 17 bp, Artificial Sequence
  Description of Artificial Sequence: Synthetic primer
aaaggagggctctaccc

SEQ ID NO: 967 - DNA, 20 bp, Artificial Sequence
  Description of Artificial Sequence: Synthetic primer
catgctcttacatgcaaata

SEQ ID NO: 968 - DNA, 20 bp, Artificial Sequence
  Description of Artificial Sequence: Synthetic primer
ccagaaaagcaagcttatta

SEQ ID NO: 969 - DNA, 21 bp, Artificial Sequence
  Description of Artificial Sequence: Synthetic primer
tcttctttaatgtgatggtac

SEQ ID NO: 970 - DNA, 23 bp, Artificial Sequence
  Description of Artificial Sequence: Synthetic primer
gaatccatagatcgtatactaat

SEQ ID NO: 971 - DNA, 17 bp, Artificial Sequence
  Description of Artificial Sequence: Synthetic primer
atttatattccgcccca

SEQ ID NO: 972 - DNA, 17 bp, Artificial Sequence
  Description of Artificial Sequence: Synthetic primer
tccaaaacgaccagtca

SEQ ID NO: 973 - DNA, 23 bp, Artificial Sequence
  Description of Artificial Sequence: Synthetic primer
ttcatgctaactgattatcaaat

SEQ ID NO: 974 - DNA, 17 bp, Artificial Sequence
  Description of Artificial Sequence: Synthetic primer
ggcaaaattccatggcc

SEQ ID NO: 975 - DNA, 18 bp, Artificial Sequence
  Description of Artificial Sequence: Synthetic primer
gagtaattggacctctac

SEQ ID NO: 976 - DNA, 18 bp, Artificial Sequence
  Description of Artificial Sequence: Synthetic primer
ccattccatatccttacc

SEQ ID NO: 977 - DNA, 17 bp, Artificial Sequence
  Description of Artificial Sequence: Synthetic primer
ttttacatctcacccca

SEQ ID NO: 978 - DNA, 17 bp, Artificial Sequence
  Description of Artificial Sequence: Synthetic primer
gaatgcattggagtgag

SEQ ID NO: 979 - DNA, 17 bp, Artificial Sequence
  Description of Artificial Sequence: Synthetic primer
atcacactccggggact

SEQ ID NO: 980 - DNA, 17 bp, Artificial Sequence
  Description of Artificial Sequence: Synthetic primer
agggcaacagggacaca

SEQ ID NO: 981 - DNA, 19 bp, Artificial Sequence
  Description of Artificial Sequence: Synthetic primer
gtattcaccattgcaaaaa

SEQ ID NO: 982 - DNA, 21 bp, Artificial Sequence
  Description of Artificial Sequence: Synthetic primer
gaacaactgaaatctgaagta

SEQ ID NO: 983 - DNA, 20 bp, Artificial Sequence
  Description of Artificial Sequence: Synthetic primer
aactgcaaatacacatttca

SEQ ID NO: 984 - DNA, 21 bp, Artificial Sequence
  Description of Artificial Sequence: Synthetic primer
gttttgaacacttaatgtttg

SEQ ID NO: 985 - DNA, 17 bp, Artificial Sequence
  Description of Artificial Sequence: Synthetic primer
gatttcacccctttccc

SEQ ID NO: 986 - DNA, 20 bp, Artificial Sequence
  Description of Artificial Sequence: Synthetic primer
aaatgttctccaagaaagat

SEQ ID NO: 987 - DNA, 22 bp, Artificial Sequence
  Description of Artificial Sequence: Synthetic primer
gtttacatatgaggaaatgtag

SEQ ID NO: 988 - DNA, 17 bp, Artificial Sequence
  Description of Artificial Sequence: Synthetic primer
gccctctaaagacatga

SEQ ID NO: 989 - DNA, 22 bp, Artificial Sequence
  Description of Artificial Sequence: Synthetic primer
gaagaaaataggctgattttat

SEQ ID NO: 990 - DNA, 22 bp, Artificial Sequence
  Description of Artificial Sequence: Synthetic primer
ctagctcttcagaattaattgg

SEQ ID NO: 991 - DNA, 18 bp, Artificial Sequence
  Description of Artificial Sequence: Synthetic primer
cccacaaagtcttatgca

SEQ ID NO: 992 - DNA, 20 bp, Artificial Sequence
  Description of Artificial Sequence: Synthetic primer
ccaacagagagaggtattta

SEQ ID NO: 993 - DNA, 19 bp, Artificial Sequence
  Description of Artificial Sequence: Synthetic primer
catggtctacacaccttta

SEQ ID NO: 994 - DNA, 19 bp, Artificial Sequence
  Description of Artificial Sequence: Synthetic primer
ccttgtaagactacctgaa

SEQ ID NO: 995 - DNA, 23 bp, Artificial Sequence
  Description of Artificial Sequence: Synthetic primer
cagttaataattgtagatccatg

SEQ ID NO: 996 - DNA, 19 bp, Artificial Sequence
  Description of Artificial Sequence: Synthetic primer
gctcttctgtaagaagtct

SEQ ID NO: 997 - DNA, 24 bp, Artificial Sequence
  Description of Artificial Sequence: Synthetic primer
atgattgtagatcattttgatgta

SEQ ID NO: 998 - DNA, 18 bp, Artificial Sequence
  Description of Artificial Sequence: Synthetic primer
ttcctaactcttcacctt

SEQ ID NO: 999 - DNA, 18 bp, Artificial Sequence
  Description of Artificial Sequence: Synthetic primer
cattgttagcaagtggaa

SEQ ID NO: 1000 - DNA, 21 bp, Artificial Sequence
  Description of Artificial Sequence: Synthetic primer
gagcataaagatgctctcagt

SEQ ID NO: 1001 - DNA, 17 bp, Artificial Sequence
  Description of Artificial Sequence: Synthetic primer
ctccgttatctccatgt

SEQ ID NO: 1002 - DNA, 23 bp, Artificial Sequence
  Description of Artificial Sequence: Synthetic primer
gcaaatgtagttgtatgtaattt

SEQ ID NO: 1003 - DNA, 20 bp, Artificial Sequence
  Description of Artificial Sequence: Synthetic primer
agtttgcttcctgaacaatc

SEQ ID NO: 1004 - DNA, 21 bp, Artificial Sequence
  Description of Artificial Sequence: Synthetic primer
ggacagctttatgtttaatac

SEQ ID NO: 1005 - DNA, 20 bp, Artificial Sequence
  Description of Artificial Sequence: Synthetic primer
gggaggtaaggaatcatgac

SEQ ID NO: 1006 - DNA, 21 bp, Artificial Sequence
  Description of Artificial Sequence: Synthetic primer
gggaacttgtccttcaaaaag

SEQ ID NO: 1007 - DNA, 20 bp, Artificial Sequence
  Description of Artificial Sequence: Synthetic primer
attgtgtccatgcttggcag

SEQ ID NO: 1008 - DNA, 21 bp, Artificial Sequence
  Description of Artificial Sequence: Synthetic primer
gcaacatactaactggaatcc

SEQ ID NO: 1009 - DNA, 20 bp, Artificial Sequence
  Description of Artificial Sequence: Synthetic primer
tgctccaaaaatggcaatcg

SEQ ID NO: 1010 - DNA, 20 bp, Artificial Sequence
  Description of Artificial Sequence: Synthetic primer
cacccctagattttgaaggt

SEQ ID NO: 1011 - DNA, 20 bp, Artificial Sequence
  Description of Artificial Sequence: Synthetic primer
ccttccctccttcattcaac

SEQ ID NO: 1012 - DNA, 20 bp, Artificial Sequence
  Description of Artificial Sequence: Synthetic primer
tgtcagctgtatggtgaagg

SEQ ID NO: 1013 - DNA, 20 bp, Artificial Sequence
  Description of Artificial Sequence: Synthetic primer
aatttggtaagacagagatg

SEQ ID NO: 1014 - DNA, 20 bp, Artificial Sequence
  Description of Artificial Sequence: Synthetic primer
aagctttgtttctctttctc

SEQ ID NO: 1015 - DNA, 20 bp, Artificial Sequence
  Description of Artificial Sequence: Synthetic primer
aagctttgtttctctttctc

SEQ ID NO: 1016 - DNA, 20 bp, Artificial Sequence
  Description of Artificial Sequence: Synthetic primer
gccttccccctcctttaaaa

SEQ ID NO: 1017 - DNA, 20 bp, Artificial Sequence
  Description of Artificial Sequence: Synthetic primer
ttttcctgatatgatgaatg

SEQ ID NO: 1018 - DNA, 20 bp, Artificial Sequence
  Description of Artificial Sequence: Synthetic primer
tgtatcccaggacatctagc

SEQ ID NO: 1019 - DNA, 20 bp, Artificial Sequence
  Description of Artificial Sequence: Synthetic primer
aaggactgggtttgcatttc

SEQ ID NO: 1020 - DNA, 20 bp, Artificial Sequence
  Description of Artificial Sequence: Synthetic primer
tgaatctaggagtggatttg

SEQ ID NO: 1021 - DNA, 20 bp, Artificial Sequence
  Description of Artificial Sequence: Synthetic primer
ggaaaactccttatgttgga

SEQ ID NO: 1022 - DNA, 20 bp, Artificial Sequence
  Description of Artificial Sequence: Synthetic primer
acttctagaagaaaacacag

SEQ ID NO: 1023 - DNA, 20 bp, Artificial Sequence
  Description of Artificial Sequence: Synthetic primer
aaaccacaaaagcatgaagc

SEQ ID NO: 1024 - DNA, 20 bp, Artificial Sequence
  Description of Artificial Sequence: Synthetic primer
atattcccttctcaagtctg

SEQ ID NO: 1025 - DNA, 21 bp, Artificial Sequence
  Description of Artificial Sequence: Synthetic primer
ccatcttttcactggattgtc

SEQ ID NO: 1026 - DNA, 20 bp, Artificial Sequence
  Description of Artificial Sequence: Synthetic primer
gcatctcactgtggttttac

SEQ ID NO: 1027 - DNA, 21 bp, Artificial Sequence
  Description of Artificial Sequence: Synthetic primer
gaccatcattagacattaggg

SEQ ID NO: 1028 - DNA, 20 bp, Artificial Sequence
  Description of Artificial Sequence: Synthetic primer
tcacaactgggaattcactg

SEQ ID NO: 1029 - DNA, 20 bp, Artificial Sequence
  Description of Artificial Sequence: Synthetic primer
ccgagtagctgggattacat

SEQ ID NO: 1030 - DNA, 20 bp, Artificial Sequence
  Description of Artificial Sequence: Synthetic primer
agagaagaaggcttcagacg

SEQ ID NO: 1031 - DNA, 20 bp, Artificial Sequence
  Description of Artificial Sequence: Synthetic primer
atacagcggttgggactatc

SEQ ID NO: 1032 - DNA, 20 bp, Artificial Sequence
  Description of Artificial Sequence: Synthetic primer
tagtccataggaatctgctg

SEQ ID NO: 1033 - DNA, 21 bp, Artificial Sequence
  Description of Artificial Sequence: Synthetic primer
gaattttacttggaaccctgg

SEQ ID NO: 1034 - DNA, 20 bp, Artificial Sequence
  Description of Artificial Sequence: Synthetic primer
gtaaaccttggacttatggg

SEQ ID NO: 1035 - DNA, 20 bp, Artificial Sequence
  Description of Artificial Sequence: Synthetic primer
tagaatagactacatccatc

SEQ ID NO: 1036 - DNA, 21 bp, Artificial Sequence
  Description of Artificial Sequence: Synthetic primer
gcctaagaaacttccttatcc

SEQ ID NO: 1037 - DNA, 20 bp, Artificial Sequence
  Description of Artificial Sequence: Synthetic primer
atgaagactttactgaaggc

SEQ ID NO: 1038 - DNA, 20 bp, Artificial Sequence
  Description of Artificial Sequence: Synthetic primer
ctctttctaagggcttctgg

SEQ ID NO: 1039 - DNA, 20 bp, Artificial Sequence
  Description of Artificial Sequence: Synthetic primer
ttgaagttgagagggtctcc

SEQ ID NO: 1040 - DNA, 20 bp, Artificial Sequence
  Description of Artificial Sequence: Synthetic primer
ttaggagggatgaggaatgg

SEQ ID NO: 1041 - DNA, 20 bp, Artificial Sequence
  Description of Artificial Sequence: Synthetic primer
tccctgagcctctgttttcc

SEQ ID NO: 1042 - DNA, 20 bp, Artificial Sequence
  Description of Artificial Sequence: Synthetic primer
atgactcatggaggcaacag

SEQ ID NO: 1043 - DNA, 20 bp, Artificial Sequence
  Description of Artificial Sequence: Synthetic primer
cagggttcatttggtgaaac

SEQ ID NO: 1044 - DNA, 20 bp, Artificial Sequence
  Description of Artificial Sequence: Synthetic primer
actgacctgtctgggatttc

SEQ ID NO: 1045 - DNA, 20 bp, Artificial Sequence
  Description of Artificial Sequence: Synthetic primer
aacagacctccaacacaacc

SEQ ID NO: 1046 - DNA, 20 bp, Artificial Sequence
  Description of Artificial Sequence: Synthetic primer
aatagggtcagtgggatgag

SEQ ID NO: 1047 - DNA, 20 bp, Artificial Sequence
  Description of Artificial Sequence: Synthetic primer
cacccagcctcagaatattt

SEQ ID NO: 1048 - DNA, 20 bp, Artificial Sequence
  Description of Artificial Sequence: Synthetic primer
cccaaacattatcttctggc

SEQ ID NO: 1049 - DNA, 20 bp, Artificial Sequence
  Description of Artificial Sequence: Synthetic primer
acaagaggacaagtgtttag

SEQ ID NO: 1050 - DNA, 20 bp, Artificial Sequence
  Description of Artificial Sequence: Synthetic primer
cctttgactttccacagaac

SEQ ID NO: 1051 - DNA, 20 bp, Artificial Sequence
  Description of Artificial Sequence: Synthetic primer
tgaccttgataacctggctg

SEQ ID NO: 1052 - DNA, 20 bp, Artificial Sequence
  Description of Artificial Sequence: Synthetic primer
cattaaatcaccacagcaac

SEQ ID NO: 1053 - DNA, 20 bp, Artificial Sequence
  Description of Artificial Sequence: Synthetic primer
actctagcctgggcaacaga

SEQ ID NO: 1054 - DNA, 21 bp, Artificial Sequence
  Description of Artificial Sequence: Synthetic primer
ccagtgtatagatctttcacc

SEQ ID NO: 1055 - DNA, 21 bp, Artificial Sequence
  Description of Artificial Sequence: Synthetic primer
gaggaaagtgtgtctattcag

SEQ ID NO: 1056 - DNA, 20 bp, Artificial Sequence
  Description of Artificial Sequence: Synthetic primer
tgtatctctgttggccattc

SEQ ID NO: 1057 - DNA, 20 bp, Artificial Sequence
  Description of Artificial Sequence: Synthetic primer
agggtcttgctcttttgttc

SEQ ID NO: 1058 - DNA, 20 bp, Artificial Sequence
  Description of Artificial Sequence: Synthetic primer
aggatcttcatagaagtggc

SEQ ID NO: 1059 - DNA, 20 bp, Artificial Sequence
  Description of Artificial Sequence: Synthetic primer
cttagcatacaatgggcacc

SEQ ID NO: 1060 - DNA, 20 bp, Artificial Sequence
  Description of Artificial Sequence: Synthetic primer
gtttcttgcttgttgatggc

SEQ ID NO: 1061 - DNA, 20 bp, Artificial Sequence
  Description of Artificial Sequence: Synthetic primer
atcctgatctcttactagtg

SEQ ID NO: 1062 - DNA, 21 bp, Artificial Sequence
  Description of Artificial Sequence: Synthetic primer
cagtagtttttcagctaaatg

SEQ ID NO: 1063 - DNA, 20 bp, Artificial Sequence
  Description of Artificial Sequence: Synthetic primer
gccacttagcaatgtgcaag

SEQ ID NO: 1064 - DNA, 21 bp, Artificial Sequence
  Description of Artificial Sequence: Synthetic primer
gtgtggttgattctgtgtaag

SEQ ID NO: 1065 - DNA, 20 bp, Artificial Sequence
  Description of Artificial Sequence: Synthetic primer
gcttgcacattgctaagtgg

SEQ ID NO: 1066 - DNA, 20 bp, Artificial Sequence
  Description of Artificial Sequence: Synthetic primer
ctgtggcattaggcaccttt

SEQ ID NO: 1067 - DNA, 20 bp, Artificial Sequence
  Description of Artificial Sequence: Synthetic primer
cagatgagaataaaggtgcc

SEQ ID NO: 1068 - DNA, 20 bp, Artificial Sequence
  Description of Artificial Sequence: Synthetic primer
aggactggtaatgttgtgag

SEQ ID NO: 1069 - DNA, 20 bp, Artificial Sequence
  Description of Artificial Sequence: Synthetic primer
gaccttgtaaataggtggcc

SEQ ID NO: 1070 - DNA, 20 bp, Artificial Sequence
  Description of Artificial Sequence: Synthetic primer
aaaacctctcaatttatttc

SEQ ID NO: 1071 - DNA, 20 bp, Artificial Sequence
  Description of Artificial Sequence: Synthetic primer
actatgcgacttttcaactg

SEQ ID NO: 1072 - DNA, 21 bp, Artificial Sequence
  Description of Artificial Sequence: Synthetic primer
acccggccgcggctgattcat

SEQ ID NO: 1073 - DNA, 20 bp, Artificial Sequence
  Description of Artificial Sequence: Synthetic primer
ccttgccaggtgaattaaag

SEQ ID NO: 1074 - DNA, 20 bp, Artificial Sequence
  Description of Artificial Sequence: Synthetic primer
tgagaaagttggagtgcagg

SEQ ID NO: 1075 - DNA, 20 bp, Artificial Sequence
  Description of Artificial Sequence: Synthetic primer
actccaactttctcaaagcc

SEQ ID NO: 1076 - DNA, 20 bp, Artificial Sequence
  Description of Artificial Sequence: Synthetic primer
ctccatcttcaccaagttcc

SEQ ID NO: 1077 - DNA, 20 bp, Artificial Sequence
  Description of Artificial Sequence: Synthetic primer
agcctttagggagtttagcc

SEQ ID NO: 1078 - DNA, 20 bp, Artificial Sequence
  Description of Artificial Sequence: Synthetic primer
cagttctatctactgtagac

SEQ ID NO: 1079 - DNA, 20 bp, Artificial Sequence
  Description of Artificial Sequence: Synthetic primer
ataatggttgcactgacttc

SEQ ID NO: 1080 - DNA, 20 bp, Artificial Sequence
  Description of Artificial Sequence: Synthetic primer
gaatccctgttcattccttg

SEQ ID NO: 1081 - DNA, 20 bp, Artificial Sequence
  Description of Artificial Sequence: Synthetic primer
tgatctcagacttccagctc

SEQ ID NO: 1082 - DNA, 20 bp, Artificial Sequence
  Description of Artificial Sequence: Synthetic primer
tagctcaactgttcttcagg

SEQ ID NO: 1083 - DNA, 20 bp, Artificial Sequence
  Description of Artificial Sequence: Synthetic primer
cccaggccagtattactgtt

SEQ ID NO: 1084 - DNA, 20 bp, Artificial Sequence
  Description of Artificial Sequence: Synthetic primer
cctttattcaggctgcagac

SEQ ID NO: 1085 - DNA, 20 bp, Artificial Sequence
  Description of Artificial Sequence: Synthetic primer
atgtatgattcactctgatg

SEQ ID NO: 1086 - DNA, 20 bp, Artificial Sequence
  Description of Artificial Sequence: Synthetic primer
gtaggcaaagatgaatcacg

SEQ ID NO: 1087 - DNA, 20 bp, Artificial Sequence
  Description of Artificial Sequence: Synthetic primer
agttcagaggttccagacag

SEQ ID NO: 1088 - DNA, 20 bp, Artificial Sequence
  Description of Artificial Sequence: Synthetic primer
ttggttagatccagctctgc

SEQ ID NO: 1089 - DNA, 20 bp, Artificial Sequence
  Description of Artificial Sequence: Synthetic primer
atataggtactgctttctcc

SEQ ID NO: 1090 - DNA, 21 bp, Artificial Sequence
  Description of Artificial Sequence: Synthetic primer
ggaacatttggctacatcatg

SEQ ID NO: 1091 - DNA, 20 bp, Artificial Sequence
  Description of Artificial Sequence: Synthetic primer
tgtaagaggagggtgtgatg

SEQ ID NO: 1092 - DNA, 20 bp, Artificial Sequence
  Description of Artificial Sequence: Synthetic primer
aaatatacttgggtagagag

SEQ ID NO: 1093 - DNA, 20 bp, Artificial Sequence
  Description of Artificial Sequence: Synthetic primer
agctagactacatagcctcc

SEQ ID NO: 1094 - DNA, 20 bp, Artificial Sequence
  Description of Artificial Sequence: Synthetic primer
taacaagtcaaaacagatgg

SEQ ID NO: 1095 - DNA, 20 bp, Artificial Sequence
  Description of Artificial Sequence: Synthetic primer
ggatctctattaaacctctc

SEQ ID NO: 1096 - DNA, 20 bp, Artificial Sequence
  Description of Artificial Sequence: Synthetic primer
ccatcaacagatgaatggac

SEQ ID NO: 1097 - DNA, 20 bp, Artificial Sequence
  Description of Artificial Sequence: Synthetic primer
gacttggtattttgtgaggg

SEQ ID NO: 1098 - DNA, 20 bp, Artificial Sequence
  Description of Artificial Sequence: Synthetic primer
ttttgagtcatgaaaaactg

SEQ ID NO: 1099 - DNA, 20 bp, Artificial Sequence
  Description of Artificial Sequence: Synthetic primer
aagccataccacaagcattc

SEQ ID NO: 1100 - DNA, 21 bp, Artificial Sequence
  Description of Artificial Sequence: Synthetic primer
cagaagatgcaatgaaaagac

SEQ ID NO: 1101 - DNA, 20 bp, Artificial Sequence
  Description of Artificial Sequence: Synthetic primer
ttatccgcattccactcttg

SEQ ID NO: 1102 - DNA, 20 bp, Artificial Sequence
  Description of Artificial Sequence: Synthetic primer
tttaaaggctcgcacctcag

SEQ ID NO: 1103 - DNA, 20 bp, Artificial Sequence
  Description of Artificial Sequence: Synthetic primer
gttggatcatcaaaaagtgg

SEQ ID NO: 1104 - DNA, 20 bp, Artificial Sequence
  Description of Artificial Sequence: Synthetic primer
gtgagtagtctgaatttgtc

SEQ ID NO: 1105 - DNA, 20 bp, Artificial Sequence
  Description of Artificial Sequence: Synthetic primer
ctccaaaacatagtaagtgc

SEQ ID NO: 1106 - DNA, 20 bp, Artificial Sequence
  Description of Artificial Sequence: Synthetic primer
acattctgaggtcatgcagg

SEQ ID NO: 1107 - DNA, 20 bp, Artificial Sequence
  Description of Artificial Sequence: Synthetic primer
gctaatgctttactctggtc

SEQ ID NO: 1108 - DNA, 20 bp, Artificial Sequence
  Description of Artificial Sequence: Synthetic primer
ttcagctgatacttgctccc

SEQ ID NO: 1109 - DNA, 20 bp, Artificial Sequence
  Description of Artificial Sequence: Synthetic primer
ttgacgtgatagaagtttgg

SEQ ID NO: 1110 - DNA, 20 bp, Artificial Sequence
  Description of Artificial Sequence: Synthetic primer
tatagagcaaaaagccaagg

SEQ ID NO: 1111 - DNA, 21 bp, Artificial Sequence
  Description of Artificial Sequence: Synthetic primer
gggagaatataaccattaagt

SEQ ID NO: 1112 - DNA, 21 bp, Artificial Sequence
  Description of Artificial Sequence: Synthetic primer
catagggactatttaaacttc

SEQ ID NO: 1113 - DNA, 20 bp, Artificial Sequence
  Description of Artificial Sequence: Synthetic primer
ctcacacaggcaatgagtag

SEQ ID NO: 1114 - DNA, 20 bp, Artificial Sequence
  Description of Artificial Sequence: Synthetic primer
cctggtctcaagcaatcatc

SEQ ID NO: 1115 - DNA, 20 bp, Artificial Sequence
  Description of Artificial Sequence: Synthetic primer
gcagagagatgagaggaaac

SEQ ID NO: 1116 - DNA, 20 bp, Artificial Sequence
  Description of Artificial Sequence: Synthetic primer
atacttgggagcactcaacg

SEQ ID NO: 1117 - DNA, 21 bp, Artificial Sequence
  Description of Artificial Sequence: Synthetic primer
ctacaaattgcttaagcaggg

SEQ ID NO: 1118 - DNA, 20 bp, Artificial Sequence
  Description of Artificial Sequence: Synthetic primer
acaagatcgttgaatggtgg

SEQ ID NO: 1119 - DNA, 20 bp, Artificial Sequence
  Description of Artificial Sequence: Synthetic primer
aatctgtgggagttagtggt

SEQ ID NO: 1120 - DNA, 20 bp, Artificial Sequence
  Description of Artificial Sequence: Synthetic primer
atgcagttgaatctcaatac

SEQ ID NO: 1121 - DNA, 20 bp, Artificial Sequence
  Description of Artificial Sequence: Synthetic primer
acaaatactccattgatggt

SEQ ID NO: 1122 - DNA, 20 bp, Artificial Sequence
  Description of Artificial Sequence: Synthetic primer
ttttgaaggacaagttcccc

SEQ ID NO: 1123 - DNA, 20 bp, Artificial Sequence
  Description of Artificial Sequence: Synthetic primer
cattttctgttactctgagg

SEQ ID NO: 1124 - DNA, 20 bp, Artificial Sequence
  Description of Artificial Sequence: Synthetic primer
cctccttctattgtggagac

SEQ ID NO: 1125 - DNA, 21 bp, Artificial Sequence
  Description of Artificial Sequence: Synthetic primer
gttcttctgtttgtcatgtgg

SEQ ID NO: 1126 - DNA, 20 bp, Artificial Sequence
  Description of Artificial Sequence: Synthetic primer
atttctacatcaccagggag

SEQ ID NO: 1127 - DNA, 20 bp, Artificial Sequence
  Description of Artificial Sequence: Synthetic primer
caatgacacattccctcacc

SEQ ID NO: 1128 - DNA, 20 bp, Artificial Sequence
  Description of Artificial Sequence: Synthetic primer
tggattcagattacgggagg

SEQ ID NO: 1129 - DNA, 20 bp, Artificial Sequence
  Description of Artificial Sequence: Synthetic primer
aacgccaagcctattttcag

SEQ ID NO: 1130 - DNA, 20 bp, Artificial Sequence
  Description of Artificial Sequence: Synthetic primer
ttgctctgttcctgaaagac

SEQ ID NO: 1131 - DNA, 20 bp, Artificial Sequence
  Description of Artificial Sequence: Synthetic primer
aacgattctacatctgcccc

SEQ ID NO: 1132 - DNA, 20 bp, Artificial Sequence
  Description of Artificial Sequence: Synthetic primer
aacgattctacatctgcccc

SEQ ID NO: 1133 - DNA, 20 bp, Artificial Sequence
  Description of Artificial Sequence: Synthetic primer
catttcaggatgaatacttg

SEQ ID NO: 1134 - DNA, 20 bp, Artificial Sequence
  Description of Artificial Sequence: Synthetic primer
ctagtaatgcagcaatagtg

SEQ ID NO: 1135 - DNA, 20 bp, Artificial Sequence
  Description of Artificial Sequence: Synthetic primer
aacattcaggaaatttcagg

SEQ ID NO: 1136 - DNA, 20 bp, Artificial Sequence
  Description of Artificial Sequence: Synthetic primer
ctaatcttggcaacattctg

SEQ ID NO: 1137 - DNA, 20 bp, Artificial Sequence
  Description of Artificial Sequence: Synthetic primer
agatctgaccatggtgatag

SEQ ID NO: 1138 - DNA, 21 bp, Artificial Sequence
  Description of Artificial Sequence: Synthetic primer
gctgtatattatattactgtg

SEQ ID NO: 1139 - DNA, 20 bp, Artificial Sequence
  Description of Artificial Sequence: Synthetic primer
tatgcttcatgcttttgtgg

SEQ ID NO: 1140 - DNA, 20 bp, Artificial Sequence
  Description of Artificial Sequence: Synthetic primer
tggcttgttgttctgttttc

SEQ ID NO: 1141 - DNA, 21 bp, Artificial Sequence
  Description of Artificial Sequence: Synthetic primer
ctggactttaccaaatttctc

SEQ ID NO: 1142 - DNA, 21 bp, Artificial Sequence
  Description of Artificial Sequence: Synthetic primer
cagacttgagaagggaatatg

SEQ ID NO: 1143 - DNA, 21 bp, Artificial Sequence
  Description of Artificial Sequence: Synthetic primer
cacaataagaggacaatccag

SEQ ID NO: 1144 - DNA, 20 bp, Artificial Sequence
  Description of Artificial Sequence: Synthetic primer
ttaatttgctctgcatccag

SEQ ID NO: 1145 - DNA, 20 bp, Artificial Sequence
  Description of Artificial Sequence: Synthetic primer
gagctccaccattatttccc

SEQ ID NO: 1146 - DNA, 20 bp, Artificial Sequence
  Description of Artificial Sequence: Synthetic primer
tggtgaaaccctgtctctac

SEQ ID NO: 1147 - DNA, 20 bp, Artificial Sequence
  Description of Artificial Sequence: Synthetic primer
tttagcttctttgcgatggg

SEQ ID NO: 1148 - DNA, 20 bp, Artificial Sequence
  Description of Artificial Sequence: Synthetic primer
gcacattgtgcacatgtacc

SEQ ID NO: 1149 - DNA, 20 bp, Artificial Sequence
  Description of Artificial Sequence: Synthetic primer
gctgctgtacattacaacac

SEQ ID NO: 1150 - DNA, 20 bp, Artificial Sequence
  Description of Artificial Sequence: Synthetic primer
cctatcttactactgaactc

SEQ ID NO: 1151 - DNA, 20 bp, Artificial Sequence
  Description of Artificial Sequence: Synthetic primer
acgatgttaccctcttttcc

SEQ ID NO: 1152 - DNA, 20 bp, Artificial Sequence
  Description of Artificial Sequence: Synthetic primer
ggataaggaagtttcttagg

SEQ ID NO: 1153 - DNA, 20 bp, Artificial Sequence
  Description of Artificial Sequence: Synthetic primer
atattgccaactaggagtac

SEQ ID NO: 1154 - DNA, 21 bp, Artificial Sequence
  Description of Artificial Sequence: Synthetic primer
catacactactaacctgttgc

SEQ ID NO: 1155 - DNA, 20 bp, Artificial Sequence
  Description of Artificial Sequence: Synthetic primer
agaggagtcggactttgttc

SEQ ID NO: 1156 - DNA, 20 bp, Artificial Sequence
  Description of Artificial Sequence: Synthetic primer
aagcaaagcacaagcaacag

SEQ ID NO: 1157 - DNA, 20 bp, Artificial Sequence
  Description of Artificial Sequence: Synthetic primer
ctccaattgcactgggttac

SEQ ID NO: 1158 - DNA, 20 bp, Artificial Sequence
  Description of Artificial Sequence: Synthetic primer
atatgtccccaccacactac

SEQ ID NO: 1159 - DNA, 20 bp, Artificial Sequence
  Description of Artificial Sequence: Synthetic primer
ggagagcgatttatggatgg

SEQ ID NO: 1160 - DNA, 20 bp, Artificial Sequence
  Description of Artificial Sequence: Synthetic primer
actgacctgtctgggatttc

SEQ ID NO: 1161 - DNA, 20 bp, Artificial Sequence
  Description of Artificial Sequence: Synthetic primer
cgcagggttcatttggtgaa

SEQ ID NO: 1162 - DNA, 20 bp, Artificial Sequence
  Description of Artificial Sequence: Synthetic primer
taggataaactcacggaagg

SEQ ID NO: 1163 - DNA, 20 bp, Artificial Sequence
  Description of Artificial Sequence: Synthetic primer
cccacctccaaatcctttac

SEQ ID NO: 1164 - DNA, 20 bp, Artificial Sequence
  Description of Artificial Sequence: Synthetic primer
ttccccaccaatacaacatc

SEQ ID NO: 1165 - DNA, 20 bp, Artificial Sequence
  Description of Artificial Sequence: Synthetic primer
gatctccataagggtaagtg

SEQ ID NO: 1166 - DNA, 20 bp, Artificial Sequence
  Description of Artificial Sequence: Synthetic primer
ggccagagctgttcataaat

SEQ ID NO: 1167 - DNA, 20 bp, Artificial Sequence
  Description of Artificial Sequence: Synthetic primer
acactcactgggttgggcta

SEQ ID NO: 1168 - DNA, 20 bp, Artificial Sequence
  Description of Artificial Sequence: Synthetic primer
agctgtgcatattgacttcc

SEQ ID NO: 1169 - DNA, 18 bp, Artificial Sequence
  Description of Artificial Sequence: Synthetic primer
tccttaggcagaatggtc

SEQ ID NO: 1170 - DNA, 20 bp, Artificial Sequence
  Description of Artificial Sequence: Synthetic primer
atgtcttgtagtttccagtg

SEQ ID NO: 1171 - DNA, 20 bp, Artificial Sequence
  Description of Artificial Sequence: Synthetic primer
agagcgagactccatcacaa

SEQ ID NO: 1172 - DNA, 20 bp, Artificial Sequence
  Description of Artificial Sequence: Synthetic primer
ccatacatctgataagaggc

SEQ ID NO: 1173 - DNA, 20 bp, Artificial Sequence
  Description of Artificial Sequence: Synthetic primer
ccatacatctgataagaggc

SEQ ID NO: 1174 - DNA, 20 bp, Artificial Sequence
  Description of Artificial Sequence: Synthetic primer
attgagcccgagaatttgag

SEQ ID NO: 1175 - DNA, 20 bp, Artificial Sequence
  Description of Artificial Sequence: Synthetic primer
aactgaggctgttttctctc

SEQ ID NO: 1176 - DNA, 20 bp, Artificial Sequence
  Description of Artificial Sequence: Synthetic primer
acagtgcctactattgtcag

SEQ ID NO: 1177 - DNA, 20 bp, Artificial Sequence
  Description of Artificial Sequence: Synthetic primer
tagccttggccaagaattca

SEQ ID NO: 1178 - DNA, 20 bp, Artificial Sequence
  Description of Artificial Sequence: Synthetic primer
ttctgtgttctctcttgagg

SEQ ID NO: 1179 - DNA, 20 bp, Artificial Sequence
  Description of Artificial Sequence: Synthetic primer
atccaaacatagatctcaac

SEQ ID NO: 1180 - DNA, 20 bp, Artificial Sequence
  Description of Artificial Sequence: Synthetic primer
gggaaagtaactagctgctc

SEQ ID NO: 1181 - DNA, 20 bp, Artificial Sequence
  Description of Artificial Sequence: Synthetic primer
actactgtcgaatcaccttg

SEQ ID NO: 1182 - DNA, 20 bp, Artificial Sequence
  Description of Artificial Sequence: Synthetic primer
ccatgggcctgagttcttaa

SEQ ID NO: 1183 - DNA, 20 bp, Artificial Sequence
  Description of Artificial Sequence: Synthetic primer
aggacactggacatattcag

SEQ ID NO: 1184 - DNA, 20 bp, Artificial Sequence
  Description of Artificial Sequence: Synthetic primer
tattgctctcttactgggac

SEQ ID NO: 1185 - DNA, 20 bp, Artificial Sequence
  Description of Artificial Sequence: Synthetic primer
gaccttgtaaataggtggcc

SEQ ID NO: 1186 - DNA, 20 bp, Artificial Sequence
  Description of Artificial Sequence: Synthetic primer
gctgaaggattcagccagta

SEQ ID NO: 1187 - DNA, 20 bp, Artificial Sequence
  Description of Artificial Sequence: Synthetic primer
atggcctccaacaaggtaag

SEQ ID NO: 1188 - DNA, 19 bp, Artificial Sequence
  Description of Artificial Sequence: Synthetic primer
accccctcgccatccgcta

SEQ ID NO: 1189 - DNA, 19 bp, Artificial Sequence
  Description of Artificial Sequence: Synthetic primer
gccccgcctgccgagcctt

SEQ ID NO: 1190 - DNA, 20 bp, Artificial Sequence
  Description of Artificial Sequence: Synthetic primer
ctatacagagcaggtatttt

SEQ ID NO: 1191 - DNA, 20 bp, Artificial Sequence
  Description of Artificial Sequence: Synthetic primer
aatcattggttacaatgaag

SEQ ID NO: 1192 - DNA, 20 bp, Artificial Sequence
  Description of Artificial Sequence: Synthetic primer
ttggtgaagatggaggaagg

SEQ ID NO: 1193 - DNA, 20 bp, Artificial Sequence
  Description of Artificial Sequence: Synthetic primer
gaaatataatgtgtggagcc

SEQ ID NO: 1194 - DNA, 20 bp, Artificial Sequence
  Description of Artificial Sequence: Synthetic primer
gcaccaaatcttgctaagtc

SEQ ID NO: 1195 - DNA, 20 bp, Artificial Sequence
  Description of Artificial Sequence: Synthetic primer
cagttccagcttctcttctc

SEQ ID NO: 1196 - DNA, 20 bp, Artificial Sequence
  Description of Artificial Sequence: Synthetic primer
actgtgtgacatgggatctg

SEQ ID NO: 1197 - DNA, 20 bp, Artificial Sequence
  Description of Artificial Sequence: Synthetic primer
ataacctcggggtccagaaa

SEQ ID NO: 1198 - DNA, 20 bp, Artificial Sequence
  Description of Artificial Sequence: Synthetic primer
tttgtcttagctcaagctgc

SEQ ID NO: 1199 - DNA, 20 bp, Artificial Sequence
  Description of Artificial Sequence: Synthetic primer
cagagtgagtgtaaatatac

SEQ ID NO: 1200 - DNA, 20 bp, Artificial Sequence
  Description of Artificial Sequence: Synthetic primer
tgacatttacaggcactcag

SEQ ID NO: 1201 - DNA, 20 bp, Artificial Sequence
  Description of Artificial Sequence: Synthetic primer
tgtggttttaatggctgtgg

SEQ ID NO: 1202 - DNA, 20 bp, Artificial Sequence
  Description of Artificial Sequence: Synthetic primer
caaaccaattggtagatttc

SEQ ID NO: 1203 - DNA, 20 bp, Artificial Sequence
  Description of Artificial Sequence: Synthetic primer
tgttttacctagcaaggagc

SEQ ID NO: 1204 - DNA, 20 bp, Artificial Sequence
  Description of Artificial Sequence: Synthetic primer
agccaagcttgcaaactctg

SEQ ID NO: 1205 - DNA, 20 bp, Artificial Sequence
  Description of Artificial Sequence: Synthetic primer
taagaggaacagggatctgc

SEQ ID NO: 1206 - DNA, 20 bp, Artificial Sequence
  Description of Artificial Sequence: Synthetic primer
ccttgtttccaaatctgagc

SEQ ID NO: 1207 - DNA, 21 bp, Artificial Sequence
  Description of Artificial Sequence: Synthetic primer
ccacagagctgatttaatttc

SEQ ID NO: 1208 - DNA, 20 bp, Artificial Sequence
  Description of Artificial Sequence: Synthetic primer
tgactctgcaggactgtctg

SEQ ID NO: 1209 - DNA, 21 bp, Artificial Sequence
  Description of Artificial Sequence: Synthetic primer
gatagctaacacatttctgac

SEQ ID NO: 1210 - DNA, 20 bp, Artificial Sequence
  Description of Artificial Sequence: Synthetic primer
tgtaggacatgacagcaaac

SEQ ID NO: 1211 - DNA, 20 bp, Artificial Sequence
  Description of Artificial Sequence: Synthetic primer
attttcaatattctgcacac

SEQ ID NO: 1212 - DNA, 20 bp, Artificial Sequence
  Description of Artificial Sequence: Synthetic primer
ttcaagggttactgatactc

SEQ ID NO: 1213 - DNA, 20 bp, Artificial Sequence
  Description of Artificial Sequence: Synthetic primer
tccttccttttttagggctg

SEQ ID NO: 1214 - DNA, 20 bp, Artificial Sequence
  Description of Artificial Sequence: Synthetic primer
tccaccatgtgaggacaaag

SEQ ID NO: 1215 - DNA, 21 bp, Artificial Sequence
  Description of Artificial Sequence: Synthetic primer
cacatgtattaattaagtagg

SEQ ID NO: 1216 - DNA, 21 bp, Artificial Sequence
  Description of Artificial Sequence: Synthetic primer
gttcacgtgaaatacactacc

SEQ ID NO: 1217 - DNA, 20 bp, Artificial Sequence
  Description of Artificial Sequence: Synthetic primer
agaacaaaatgttaggacgc

SEQ ID NO: 1218 - DNA, 20 bp, Artificial Sequence
  Description of Artificial Sequence: Synthetic primer
acactggtcctcataacaag

SEQ ID NO: 1219 - DNA, 20 bp, Artificial Sequence
  Description of Artificial Sequence: Synthetic primer
tccgaaggaaagtgattctc

SEQ ID NO: 1220 - DNA, 21 bp, Artificial Sequence
  Description of Artificial Sequence: Synthetic primer
ggctagagtactaaaaatcag

SEQ ID NO: 1221 - DNA, 20 bp, Artificial Sequence
  Description of Artificial Sequence: Synthetic primer
aggcttcagaatcggtcatc

SEQ ID NO: 1222 - DNA, 20 bp, Artificial Sequence
  Description of Artificial Sequence: Synthetic primer
tgaacatttagaattagggg

SEQ ID NO: 1223 - DNA, 20 bp, Artificial Sequence
  Description of Artificial Sequence: Synthetic primer
ctcagagcctgcattatctc

SEQ ID NO: 1224 - DNA, 20 bp, Artificial Sequence
  Description of Artificial Sequence: Synthetic primer
cacactccaaaatgtgcaac

SEQ ID NO: 1225 - DNA, 20 bp, Artificial Sequence
  Description of Artificial Sequence: Synthetic primer
ctctacctaccaacatcgtc

SEQ ID NO: 1226 - DNA, 20 bp, Artificial Sequence
  Description of Artificial Sequence: Synthetic primer
ctgaaaagggtggctttctc

SEQ ID NO: 1227 - DNA, 20 bp, Artificial Sequence
  Description of Artificial Sequence: Synthetic primer
ccacttctaccacattcttc

SEQ ID NO: 1228 - DNA, 20 bp, Artificial Sequence
  Description of Artificial Sequence: Synthetic primer
gaattgcattttatccaatc

SEQ ID NO: 1229 - DNA, 21 bp, Artificial Sequence
  Description of Artificial Sequence: Synthetic primer
gagtgttctttagagattaag

SEQ ID NO: 1230 - DNA, 20 bp, Artificial Sequence
  Description of Artificial Sequence: Synthetic primer
agccactacttctcaatctc

SEQ ID NO: 1231 - DNA, 20 bp, Artificial Sequence
  Description of Artificial Sequence: Synthetic primer
ataaggccagatgtggtgac

SEQ ID NO: 1232 - DNA, 20 bp, Artificial Sequence
  Description of Artificial Sequence: Synthetic primer
cctcatatctaatctctccc

SEQ ID NO: 1233 - DNA, 20 bp, Artificial Sequence
  Description of Artificial Sequence: Synthetic primer
caacaagacggaatccaaag

SEQ ID NO: 1234 - DNA, 20 bp, Artificial Sequence
  Description of Artificial Sequence: Synthetic primer
tgatagagtagagagactcc

SEQ ID NO: 1235 - DNA, 20 bp, Artificial Sequence
  Description of Artificial Sequence: Synthetic primer
gactttgtatactgccactc

SEQ ID NO: 1236 - DNA, 20 bp, Artificial Sequence
  Description of Artificial Sequence: Synthetic primer
ttcctcatcctcatcttccc

SEQ ID NO: 1237 - DNA, 19 bp, Artificial Sequence
  Description of Artificial Sequence: Synthetic primer
cctgaacaatcttaaatgc

SEQ ID NO: 1238 - DNA, 19 bp, Artificial Sequence
  Description of Artificial Sequence: Synthetic primer
gtcttatgcattttgaagg

SEQ ID NO: 1239 - DNA, 19 bp, Artificial Sequence
  Description of Artificial Sequence: Synthetic primer
ggaatcatgactacttgga

SEQ ID NO: 1240 - DNA, 17 bp, Artificial Sequence
  Description of Artificial Sequence: Synthetic primer
gaaacaaagcaaacgac

SEQ ID NO: 1241 - DNA, 17 bp, Artificial Sequence
  Description of Artificial Sequence: Synthetic primer
tgcttggcaggcttttt

SEQ ID NO: 1242 - DNA, 20 bp, Artificial Sequence
  Description of Artificial Sequence: Synthetic primer
cagtataagtaatttggccc

SEQ ID NO: 1243 - DNA, 19 bp, Artificial Sequence
  Description of Artificial Sequence: Synthetic primer
gagcattttaattgcttcc

SEQ ID NO: 1244 - DNA, 17 bp, Artificial Sequence
  Description of Artificial Sequence: Synthetic primer
agctgagagcagccatg

SEQ ID NO: 1245 - DNA, 19 bp, Artificial Sequence
  Description of Artificial Sequence: Synthetic primer
gagctgtttctttcagttt

SEQ ID NO: 1246 - DNA, 17 bp, Artificial Sequence
  Description of Artificial Sequence: Synthetic primer
atggtgaaggtggagga

SEQ ID NO: 1247 - DNA, 17 bp, Artificial Sequence
  Description of Artificial Sequence: Synthetic primer
tcagctgtatggtgaag

SEQ ID NO: 1248 - DNA, 18 bp, Artificial Sequence
  Description of Artificial Sequence: Synthetic primer
gtgcctgacatagagtag

SEQ ID NO: 1249 - DNA, 17 bp, Artificial Sequence
  Description of Artificial Sequence: Synthetic primer
ggcagtgcctgacatag

SEQ ID NO: 1250 - DNA, 21 bp, Artificial Sequence
  Description of Artificial Sequence: Synthetic primer
cccctcctttaaaaaaaaaaa

SEQ ID NO: 1251 - DNA, 19 bp, Artificial Sequence
  Description of Artificial Sequence: Synthetic primer
caaatgtaacaaagtgcca

SEQ ID NO: 1252 - DNA, 17 bp, Artificial Sequence
  Description of Artificial Sequence: Synthetic primer
gcctccctggcctctgc

SEQ ID NO: 1253 - DNA, 17 bp, Artificial Sequence
  Description of Artificial Sequence: Synthetic primer
aatcctgtcacctatgg

SEQ ID NO: 1254 - DNA, 20 bp, Artificial Sequence
  Description of Artificial Sequence: Synthetic primer
gtgccttgaattaaagaatc

SEQ ID NO: 1255 - DNA, 17 bp, Artificial Sequence
  Description of Artificial Sequence: Synthetic primer
cttatgttggagaggtc

SEQ ID NO: 1256 - DNA, 21 bp, Artificial Sequence
  Description of Artificial Sequence: Synthetic primer
tagaaagtagttgtgatcttg

SEQ ID NO: 1257 - DNA, 22 bp, Artificial Sequence
  Description of Artificial Sequence: Synthetic primer
aaaaatggtatactggacttta

SEQ ID NO: 1258 - DNA, 17 bp, Artificial Sequence
  Description of Artificial Sequence: Synthetic primer
ctgtggcttgttgttct

SEQ ID NO: 1259 - DNA, 18 bp, Artificial Sequence
  Description of Artificial Sequence: Synthetic primer
cactggattgtcctctta

SEQ ID NO: 1260 - DNA, 20 bp, Artificial Sequence
  Description of Artificial Sequence: Synthetic primer
cctaatgtctaatgatggtc

SEQ ID NO: 1261 - DNA, 17 bp, Artificial Sequence
  Description of Artificial Sequence: Synthetic primer
cacagtgagatgccaca

SEQ ID NO: 1262 - DNA, 19 bp, Artificial Sequence
  Description of Artificial Sequence: Synthetic primer
cttggataactgtatgcct

SEQ ID NO: 1263 - DNA, 17 bp, Artificial Sequence
  Description of Artificial Sequence: Synthetic primer
ttacatgagtgcaccac

SEQ ID NO: 1264 - DNA, 19 bp, Artificial Sequence
  Description of Artificial Sequence: Synthetic primer
ggtaataaacttttccgag

SEQ ID NO: 1265 - DNA, 21 bp, Artificial Sequence
  Description of Artificial Sequence: Synthetic primer
gttgggactatctactttttt

SEQ ID NO: 1266 - DNA, 21 bp, Artificial Sequence
  Description of Artificial Sequence: Synthetic primer
cataggaatctgctgcctcac

SEQ ID NO: 1267 - DNA, 20 bp, Artificial Sequence
  Description of Artificial Sequence: Synthetic primer
acttggaaccctggtatttt

SEQ ID NO: 1268 - DNA, 19 bp, Artificial Sequence
  Description of Artificial Sequence: Synthetic primer
ggggcaaaaagacaataaa

SEQ ID NO: 1269 - DNA, 24 bp, Artificial Sequence
  Description of Artificial Sequence: Synthetic primer
gaatagactacatccatcaaaata

SEQ ID NO: 1270 - DNA, 21 bp, Artificial Sequence
  Description of Artificial Sequence: Synthetic primer
gaaacttccttatccaaggcc

SEQ ID NO: 1271 - DNA, 22 bp, Artificial Sequence
  Description of Artificial Sequence: Synthetic primer
gcaattaaaagtggtacaataa

SEQ ID NO: 1272 - DNA, 21 bp, Artificial Sequence
  Description of Artificial Sequence: Synthetic primer
caataaaaggaaagagacttc

SEQ ID NO: 1273 - DNA, 17 bp, Artificial Sequence
  Description of Artificial Sequence: Synthetic primer
agagggtctcctgtagg

SEQ ID NO: 1274 - DNA, 23 bp, Artificial Sequence
  Description of Artificial Sequence: Synthetic primer
gaggaatggaactatttttaaac

SEQ ID NO: 1275 - DNA, 19 bp, Artificial Sequence
  Description of Artificial Sequence: Synthetic primer
ctctgttttccctgtaaat

SEQ ID NO: 1276 - DNA, 17 bp, Artificial Sequence
  Description of Artificial Sequence: Synthetic primer
gcaacaggtgaagctga

SEQ ID NO: 1277 - DNA, 18 bp, Artificial Sequence
  Description of Artificial Sequence: Synthetic primer
gactgaacctttaggaga

SEQ ID NO: 1278 - DNA, 18 bp, Artificial Sequence
  Description of Artificial Sequence: Synthetic primer
ttctcctaaaggttcagt

SEQ ID NO: 1279 - DNA, 17 bp, Artificial Sequence
  Description of Artificial Sequence: Synthetic primer
ccaacacaacctcttaa

SEQ ID NO: 1280 - DNA, 19 bp, Artificial Sequence
  Description of Artificial Sequence: Synthetic primer
ccaagtgactaaagcagat

SEQ ID NO: 1281 - DNA, 21 bp, Artificial Sequence
  Description of Artificial Sequence: Synthetic primer
aaaacctaatgctcagttaaa

SEQ ID NO: 1282 - DNA, 22 bp, Artificial Sequence
  Description of Artificial Sequence: Synthetic primer
tctggcataaagtaaactaatc

SEQ ID NO: 1283 - DNA, 17 bp, Artificial Sequence
  Description of Artificial Sequence: Synthetic primer
ggggactagtcaacaaa

SEQ ID NO: 1284 - DNA, 18 bp, Artificial Sequence
  Description of Artificial Sequence: Synthetic primer
tctgatgaggtcttctac

SEQ ID NO: 1285 - DNA, 18 bp, Artificial Sequence
  Description of Artificial Sequence: Synthetic primer
ggctgaagtagtgatagg

SEQ ID NO: 1286 - DNA, 17 bp, Artificial Sequence
  Description of Artificial Sequence: Synthetic primer
gaagcacagaaggcaac

SEQ ID NO: 1287 - DNA, 17 bp, Artificial Sequence
  Description of Artificial Sequence: Synthetic primer
cagagcgagactccatc

SEQ ID NO: 1288 - DNA, 20 bp, Artificial Sequence
  Description of Artificial Sequence: Synthetic primer
gatttgctcctaagtttttt

SEQ ID NO: 1289 - DNA, 20 bp, Artificial Sequence
  Description of Artificial Sequence: Synthetic primer
gtgtctattcagatcctttg

SEQ ID NO: 1290 - DNA, 17 bp, Artificial Sequence
  Description of Artificial Sequence: Synthetic primer
ttgaggaaagtgtgtct

SEQ ID NO: 1291 - DNA, 17 bp, Artificial Sequence
  Description of Artificial Sequence: Synthetic primer
ggctggagtgcagtggc

SEQ ID NO: 1292 - DNA, 19 bp, Artificial Sequence
  Description of Artificial Sequence: Synthetic primer
tccacattatgcaactaca

SEQ ID NO: 1293 - DNA, 20 bp, Artificial Sequence
  Description of Artificial Sequence: Synthetic primer
aaaagtcagtgtaagagttc

SEQ ID NO: 1294 - DNA, 17 bp, Artificial Sequence
  Description of Artificial Sequence: Synthetic primer
tgatggcattgaagcag

SEQ ID NO: 1295 - DNA, 23 bp, Artificial Sequence
  Description of Artificial Sequence: Synthetic primer
gtttttattgtgcttttcaatct

SEQ ID NO: 1296 - DNA, 18 bp, Artificial Sequence
  Description of Artificial Sequence: Synthetic primer
gaatttgagcagctagtt

SEQ ID NO: 1297 - DNA, 19 bp, Artificial Sequence
  Description of Artificial Sequence: Synthetic primer
tgtgcaagcattagtgtat

SEQ ID NO: 1298 - DNA, 17 bp, Artificial Sequence
  Description of Artificial Sequence: Synthetic primer
gagcagaatcaaaagcc

SEQ ID NO: 1299 - DNA, 21 bp, Artificial Sequence
  Description of Artificial Sequence: Synthetic primer
gctcttcattttcttacacag

SEQ ID NO: 1300 - DNA, 18 bp, Artificial Sequence
  Description of Artificial Sequence: Synthetic primer
aggcacctttattctcat

SEQ ID NO: 1301 - DNA, 19 bp, Artificial Sequence
  Description of Artificial Sequence: Synthetic primer
gaataaaggtgcctaatgc

SEQ ID NO: 1302 - DNA, 17 bp, Artificial Sequence
  Description of Artificial Sequence: Synthetic primer
gtaatagttgcctcgtc

SEQ ID NO: 1303 - DNA, 23 bp, Artificial Sequence
  Description of Artificial Sequence: Synthetic primer
ttactaattgtctcacaacatta

SEQ ID NO: 1304 - DNA, 17 bp, Artificial Sequence
  Description of Artificial Sequence: Synthetic primer
tcgccggcatgggaatc

SEQ ID NO: 1305 - DNA, 17 bp, Artificial Sequence
  Description of Artificial Sequence: Synthetic primer
agtcccagtccaggagc

SEQ ID NO: 1306 - DNA, 18 bp, Artificial Sequence
  Description of Artificial Sequence: Synthetic primer
ttcattcacttcaagtgc

SEQ ID NO: 1307 - DNA, 23 bp, Artificial Sequence
  Description of Artificial Sequence: Synthetic primer
gtgaattaaagtttcagattgaa

SEQ ID NO: 1308 - DNA, 17 bp, Artificial Sequence
  Description of Artificial Sequence: Synthetic primer
ggagaggagccacagaa

SEQ ID NO: 1309 - DNA, 18 bp, Artificial Sequence
  Description of Artificial Sequence: Synthetic primer
caagtgatttcccagtag

SEQ ID NO: 1310 - DNA, 17 bp, Artificial Sequence
  Description of Artificial Sequence: Synthetic primer
accaagttcccaaagct

SEQ ID NO: 1311 - DNA, 23 bp, Artificial Sequence
  Description of Artificial Sequence: Synthetic primer
ggagtttagccaatagtttttgc

SEQ ID NO: 1312 - DNA, 19 bp, Artificial Sequence
  Description of Artificial Sequence: Synthetic primer
gacagtatcaattccttcc

SEQ ID NO: 1313 - DNA, 21 bp, Artificial Sequence
  Description of Artificial Sequence: Synthetic primer
tgacttcaactttactttctt

SEQ ID NO: 1314 - DNA, 21 bp, Artificial Sequence
  Description of Artificial Sequence: Synthetic primer
ccctaaaaactgttccaggta

SEQ ID NO: 1315 - DNA, 20 bp, Artificial Sequence
  Description of Artificial Sequence: Synthetic primer
ccagaactgtgagaaataaa

SEQ ID NO: 1316 - DNA, 24 bp, Artificial Sequence
  Description of Artificial Sequence: Synthetic primer
gttttctatttgaaattgaggtat

SEQ ID NO: 1317 - DNA, 22 bp, Artificial Sequence
  Description of Artificial Sequence: Synthetic primer
ccagtattactgtttgaatctc

SEQ ID NO: 1318 - DNA, 17 bp, Artificial Sequence
  Description of Artificial Sequence: Synthetic primer
ctgcagacatttcctac

SEQ ID NO: 1319 - DNA, 22 bp, Artificial Sequence
  Description of Artificial Sequence: Synthetic primer
ttcactctgatgttttctattt

SEQ ID NO: 1320 - DNA, 17 bp, Artificial Sequence
  Description of Artificial Sequence: Synthetic primer
cataacctctggtttcc

SEQ ID NO: 1321 - DNA, 18 bp, Artificial Sequence
  Description of Artificial Sequence: Synthetic primer
ggaggatatccatgcccc

SEQ ID NO: 1322 - DNA, 19 bp, Artificial Sequence
  Description of Artificial Sequence: Synthetic primer
agctctgcctcccccattt

SEQ ID NO: 1323 - DNA, 17 bp, Artificial Sequence
  Description of Artificial Sequence: Synthetic primer
aggtgccaagctagtca

SEQ ID NO: 1324 - DNA, 18 bp, Artificial Sequence
  Description of Artificial Sequence: Synthetic primer
ggctacatcatgttttgg

SEQ ID NO: 1325 - DNA, 17 bp, Artificial Sequence
  Description of Artificial Sequence: Synthetic primer
ccctggtaactgtagtg

SEQ ID NO: 1326 - DNA, 17 bp, Artificial Sequence
  Description of Artificial Sequence: Synthetic primer
taggcatgctcaaactc

SEQ ID NO: 1327 - DNA, 17 bp, Artificial Sequence
  Description of Artificial Sequence: Synthetic primer
gcctcctaaaaaagcac

SEQ ID NO: 1328 - DNA, 22 bp, Artificial Sequence
  Description of Artificial Sequence: Synthetic primer
gtttaatgacattttagagagg

SEQ ID NO: 1329 - DNA, 22 bp, Artificial Sequence
  Description of Artificial Sequence: Synthetic primer
aacctctctaaaatgtcattaa

SEQ ID NO: 1330 - DNA, 23 bp, Artificial Sequence
  Description of Artificial Sequence: Synthetic primer
ggacaaaggaaatgtgatatata

SEQ ID NO: 1331 - DNA, 17 bp, Artificial Sequence
  Description of Artificial Sequence: Synthetic primer
ggctcatttcctgggtc

SEQ ID NO: 1332 - DNA, 21 bp, Artificial Sequence
  Description of Artificial Sequence: Synthetic primer
gaaaaactgacaacatatgag

SEQ ID NO: 1333 - DNA, 21 bp, Artificial Sequence
  Description of Artificial Sequence: Synthetic primer
cccagaggatatagatttcat

SEQ ID NO: 1334 - DNA, 18 bp, Artificial Sequence
  Description of Artificial Sequence: Synthetic primer
ggatatttcagtggtgct

SEQ ID NO: 1335 - DNA, 18 bp, Artificial Sequence
  Description of Artificial Sequence: Synthetic primer
caccattaacctggtcta

SEQ ID NO: 1336 - DNA, 20 bp, Artificial Sequence
  Description of Artificial Sequence: Synthetic primer
actcttgatcaatagtttgg

SEQ ID NO: 1337 - DNA, 20 bp, Artificial Sequence
  Description of Artificial Sequence: Synthetic primer
gtagttgacaaatcttacct

SEQ ID NO: 1338 - DNA, 21 bp, Artificial Sequence
  Description of Artificial Sequence: Synthetic primer
ttgttagtgtattagccattg

SEQ ID NO: 1339 - DNA, 18 bp, Artificial Sequence
  Description of Artificial Sequence: Synthetic primer
gtgcaaagatcaatcaca

SEQ ID NO: 1340 - DNA, 17 bp, Artificial Sequence
  Description of Artificial Sequence: Synthetic primer
ggtcatgcaggaaatag

SEQ ID NO: 1341 - DNA, 17 bp, Artificial Sequence
  Description of Artificial Sequence: Synthetic primer
tctggtctatttcctgc

SEQ ID NO: 1342 - DNA, 17 bp, Artificial Sequence
  Description of Artificial Sequence: Synthetic primer
cccacaggtttttcaca

SEQ ID NO: 1343 - DNA, 19 bp, Artificial Sequence
  Description of Artificial Sequence: Synthetic primer
gggcccccgttttgccctg

SEQ ID NO: 1344 - DNA, 23 bp, Artificial Sequence
  Description of Artificial Sequence: Synthetic primer
caaaaagccaaggatataaaata

SEQ ID NO: 1345 - DNA, 24 bp, Artificial Sequence
  Description of Artificial Sequence: Synthetic primer
gtatgatctgatttccataaatag

SEQ ID NO: 1346 - DNA, 22 bp, Artificial Sequence
  Description of Artificial Sequence: Synthetic primer
gaaatgaataaatggcaaaaaa

SEQ ID NO: 1347 - DNA, 21 bp, Artificial Sequence
  Description of Artificial Sequence: Synthetic primer
gcaatgagtagactaaaaaaa

SEQ ID NO: 1348 - DNA, 17 bp, Artificial Sequence
  Description of Artificial Sequence: Synthetic primer
agcaatcatcccacctc

SEQ ID NO: 1349 - DNA, 17 bp, Artificial Sequence
  Description of Artificial Sequence: Synthetic primer
cagacacccactgacca

SEQ ID NO: 1350 - DNA, 17 bp, Artificial Sequence
  Description of Artificial Sequence: Synthetic primer
acgaaggtcccgtctga

SEQ ID NO: 1351 - DNA, 20 bp, Artificial Sequence
  Description of Artificial Sequence: Synthetic primer
cagggatttaaaatgaaacc

SEQ ID NO: 1352 - DNA, 18 bp, Artificial Sequence
  Description of Artificial Sequence: Synthetic primer
aatggtgggtcattagtt

SEQ ID NO: 1353 - DNA, 17 bp, Artificial Sequence
  Description of Artificial Sequence: Synthetic primer
gcacctacagaggaaat

SEQ ID NO: 1354 - DNA, 20 bp, Artificial Sequence
  Description of Artificial Sequence: Synthetic primer
ttccctcccttcctttcttc

SEQ ID NO: 1355 - DNA, 20 bp, Artificial Sequence
  Description of Artificial Sequence: Synthetic primer
cacatacttgtctgaggatc

SEQ ID NO: 1356 - DNA, 20 bp, Artificial Sequence
  Description of Artificial Sequence: Synthetic primer
agctggattcagagcctttg

SEQ ID NO: 1357 - DNA, 20 bp, Artificial Sequence
  Description of Artificial Sequence: Synthetic primer
tctgctatcaccttgttccc

SEQ ID NO: 1358 - DNA, 20 bp, Artificial Sequence
  Description of Artificial Sequence: Synthetic primer
agaaggacagttgcaacagg

SEQ ID NO: 1359 - DNA, 20 bp, Artificial Sequence
  Description of Artificial Sequence: Synthetic primer
gttcctcatccagtccttac

SEQ ID NO: 1360 - DNA, 20 bp, Artificial Sequence
  Description of Artificial Sequence: Synthetic primer
ttatgactcataactttttg

SEQ ID NO: 1361 - DNA, 20 bp, Artificial Sequence
  Description of Artificial Sequence: Synthetic primer
ataaagtctgggctcagatg

SEQ ID NO: 1362 - DNA, 20 bp, Artificial Sequence
  Description of Artificial Sequence: Synthetic primer
tgtggcatatcttctattgc

SEQ ID NO: 1363 - DNA, 20 bp, Artificial Sequence
  Description of Artificial Sequence: Synthetic primer
ggaggctttttcacattcac

SEQ ID NO: 1364 - DNA, 20 bp, Artificial Sequence
  Description of Artificial Sequence: Synthetic primer
tgagtatggattctcaggtg

SEQ ID NO: 1365 - DNA, 20 bp, Artificial Sequence
  Description of Artificial Sequence: Synthetic primer
gtgtgtgatgaatatgggag

SEQ ID NO: 1366 - DNA, 20 bp, Artificial Sequence
  Description of Artificial Sequence: Synthetic primer
gtcacacctctttgtacatc

SEQ ID NO: 1367 - DNA, 20 bp, Artificial Sequence
  Description of Artificial Sequence: Synthetic primer
aagtgtgagagagctttcag

SEQ ID NO: 1368 - DNA, 20 bp, Artificial Sequence
  Description of Artificial Sequence: Synthetic primer
tcatatcttgtgggttgtcc

SEQ ID NO: 1369 - DNA, 20 bp, Artificial Sequence
  Description of Artificial Sequence: Synthetic primer
catggcctcttacaagactc

SEQ ID NO: 1370 - DNA, 20 bp, Artificial Sequence
  Description of Artificial Sequence: Synthetic primer
gaggtattggtgattagggc

SEQ ID NO: 1371 - DNA, 20 bp, Artificial Sequence
  Description of Artificial Sequence: Synthetic primer
gcaagtgagatcttggtagg

SEQ ID NO: 1372 - DNA, 20 bp, Artificial Sequence
  Description of Artificial Sequence: Synthetic primer
cagaggtgtcacttcaggaa

SEQ ID NO: 1373 - DNA, 20 bp, Artificial Sequence
  Description of Artificial Sequence: Synthetic primer
tgccttaattcatgcaaccc

SEQ ID NO: 1374 - DNA, 20 bp, Artificial Sequence
  Description of Artificial Sequence: Synthetic primer
caaatctacttttgagtacc

SEQ ID NO: 1375 - DNA, 20 bp, Artificial Sequence
  Description of Artificial Sequence: Synthetic primer
gtggtataactcctcagaag

SEQ ID NO: 1376 - DNA, 20 bp, Artificial Sequence
  Description of Artificial Sequence: Synthetic primer
aattcctcacattaacccag

SEQ ID NO: 1377 - DNA, 20 bp, Artificial Sequence
  Description of Artificial Sequence: Synthetic primer
ccacagcaaagacaaaaggg

SEQ ID NO: 1378 - DNA, 20 bp, Artificial Sequence
  Description of Artificial Sequence: Synthetic primer
agtgaggtataatgccagcc

SEQ ID NO: 1379 - DNA, 20 bp, Artificial Sequence
  Description of Artificial Sequence: Synthetic primer
tatgcggtggagaagaaagg

SEQ ID NO: 1380 - DNA, 20 bp, Artificial Sequence
  Description of Artificial Sequence: Synthetic primer
actgggattttctggtgaag

SEQ ID NO: 1381 - DNA, 20 bp, Artificial Sequence
  Description of Artificial Sequence: Synthetic primer
aggtttctgggttttctctc

SEQ ID NO: 1382 - DNA, 20 bp, Artificial Sequence
  Description of Artificial Sequence: Synthetic primer
ttgttggccttgttcatgtc

SEQ ID NO: 1383 - DNA, 20 bp, Artificial Sequence
  Description of Artificial Sequence: Synthetic primer
tggactcctgtgggataatg

SEQ ID NO: 1384 - DNA, 20 bp, Artificial Sequence
  Description of Artificial Sequence: Synthetic primer
tacctgtccacagaaatagc

SEQ ID NO: 1385 - DNA, 20 bp, Artificial Sequence
  Description of Artificial Sequence: Synthetic primer
ggttcatgtgatttggaagc

SEQ ID NO: 1386 - DNA, 20 bp, Artificial Sequence
  Description of Artificial Sequence: Synthetic primer
gggacttctcagcttccaaa

SEQ ID NO: 1387 - DNA, 21 bp, Artificial Sequence
  Description of Artificial Sequence: Synthetic primer
ctgatagaggtttatctcagc

SEQ ID NO: 1388 - DNA, 20 bp, Artificial Sequence
  Description of Artificial Sequence: Synthetic primer
taacaagcccctaactagtc

SEQ ID NO: 1389 - DNA, 20 bp, Artificial Sequence
  Description of Artificial Sequence: Synthetic primer
gtgcagtggatcctttttcc

SEQ ID NO: 1390 - DNA, 20 bp, Artificial Sequence
  Description of Artificial Sequence: Synthetic primer
cccttgaatgagatggagac

SEQ ID NO: 1391 - DNA, 20 bp, Artificial Sequence
  Description of Artificial Sequence: Synthetic primer
acagtgctaagcactttccc

SEQ ID NO: 1392 - DNA, 20 bp, Artificial Sequence
  Description of Artificial Sequence: Synthetic primer
agcctggcttcttcgtctac

SEQ ID NO: 1393 - DNA, 20 bp, Artificial Sequence
  Description of Artificial Sequence: Synthetic primer
atgtgtgcatgagaggagag

SEQ ID NO: 1394 - DNA, 20 bp, Artificial Sequence
  Description of Artificial Sequence: Synthetic primer
cttttaaagccagatggacc

SEQ ID NO: 1395 - DNA, 20 bp, Artificial Sequence
  Description of Artificial Sequence: Synthetic primer
actgcaccagacgctttcac

SEQ ID NO: 1396 - DNA, 20 bp, Artificial Sequence
  Description of Artificial Sequence: Synthetic primer
tctctcatcatggcttgtgg

SEQ ID NO: 1397 - DNA, 20 bp, Artificial Sequence
  Description of Artificial Sequence: Synthetic primer
taaagtctggggaggtcagg

SEQ ID NO: 1398 - DNA, 20 bp, Artificial Sequence
  Description of Artificial Sequence: Synthetic primer
gcaacaagagcgaaactctg

SEQ ID NO: 1399 - DNA, 20 bp, Artificial Sequence
  Description of Artificial Sequence: Synthetic primer
acctttcatatacagctggg

SEQ ID NO: 1400 - DNA, 20 bp, Artificial Sequence
  Description of Artificial Sequence: Synthetic primer
actgatctgggctaggaatc

SEQ ID NO: 1401 - DNA, 20 bp, Artificial Sequence
  Description of Artificial Sequence: Synthetic primer
taaaatgttgtttaccaggg

SEQ ID NO: 1402 - DNA, 20 bp, Artificial Sequence
  Description of Artificial Sequence: Synthetic primer
gccaaatattgttttccttg

SEQ ID NO: 1403 - DNA, 20 bp, Artificial Sequence
  Description of Artificial Sequence: Synthetic primer
tccttctctgatctcagttg

SEQ ID NO: 1404 - DNA, 20 bp, Artificial Sequence
  Description of Artificial Sequence: Synthetic primer
agagacctgagatgctaccc

SEQ ID NO: 1405 - DNA, 20 bp, Artificial Sequence
  Description of Artificial Sequence: Synthetic primer
aaaggtgtttccagcagata

SEQ ID NO: 1406 - DNA, 20 bp, Artificial Sequence
  Description of Artificial Sequence: Synthetic primer
aacaagtcatctagccagag

SEQ ID NO: 1407 - DNA, 20 bp, Artificial Sequence
  Description of Artificial Sequence: Synthetic primer
cctggcttagaagcagaaaa

SEQ ID NO: 1408 - DNA, 19 bp, Artificial Sequence
  Description of Artificial Sequence: Synthetic primer
gcactggagatcactaatc

SEQ ID NO: 1409 - DNA, 20 bp, Artificial Sequence
  Description of Artificial Sequence: Synthetic primer
tatctgtggccaaaccacct

SEQ ID NO: 1410 - DNA, 20 bp, Artificial Sequence
  Description of Artificial Sequence: Synthetic primer
tttccttgagtctttgggtc

SEQ ID NO: 1411 - DNA, 20 bp, Artificial Sequence
  Description of Artificial Sequence: Synthetic primer
attaggactgtagggacaga

SEQ ID NO: 1412 - DNA, 20 bp, Artificial Sequence
  Description of Artificial Sequence: Synthetic primer
attaggactgtagggacaga

SEQ ID NO: 1413 - DNA, 20 bp, Artificial Sequence
  Description of Artificial Sequence: Synthetic primer
atgtcagctgtgatccttat

SEQ ID NO: 1414 - DNA, 20 bp, Artificial Sequence
  Description of Artificial Sequence: Synthetic primer
tgatggaagtctccattctg

SEQ ID NO: 1415 - DNA, 20 bp, Artificial Sequence
  Description of Artificial Sequence: Synthetic primer
gggctaatagctccctagaa

SEQ ID NO: 1416 - DNA, 20 bp, Artificial Sequence
  Description of Artificial Sequence: Synthetic primer
atgcttcccagaatggagac

SEQ ID NO: 1417 - DNA, 20 bp, Artificial Sequence
  Description of Artificial Sequence: Synthetic primer
tcctcttttggctccaaagt

SEQ ID NO: 1418 - DNA, 20 bp, Artificial Sequence
  Description of Artificial Sequence: Synthetic primer
tcctttcgcactttggagcc

SEQ ID NO: 1419 - DNA, 20 bp, Artificial Sequence
  Description of Artificial Sequence: Synthetic primer
tgtgaccaatccgcggccaa

SEQ ID NO: 1420 - DNA, 19 bp, Artificial Sequence
  Description of Artificial Sequence: Synthetic primer
tgaaatcccagccgcctag

SEQ ID NO: 1421 - DNA, 19 bp, Artificial Sequence
  Description of Artificial Sequence: Synthetic primer
tgcaggcgtcctgcctgct

SEQ ID NO: 1422 - DNA, 20 bp, Artificial Sequence
  Description of Artificial Sequence: Synthetic primer
gtgacatagatgtagcaagg

SEQ ID NO: 1423 - DNA, 20 bp, Artificial Sequence
  Description of Artificial Sequence: Synthetic primer
cggaggtgacatagatgtag

SEQ ID NO: 1424 - DNA, 20 bp, Artificial Sequence
  Description of Artificial Sequence: Synthetic primer
tagaaatggccacttggatt

SEQ ID NO: 1425 - DNA, 20 bp, Artificial Sequence
  Description of Artificial Sequence: Synthetic primer
gggatgcttggagaagctga

SEQ ID NO: 1426 - DNA, 20 bp, Artificial Sequence
  Description of Artificial Sequence: Synthetic primer
cctcagtctatttccagcag

SEQ ID NO: 1427 - DNA, 20 bp, Artificial Sequence
  Description of Artificial Sequence: Synthetic primer
gacagtatgtactggggtgg

SEQ ID NO: 1428 - DNA, 20 bp, Artificial Sequence
  Description of Artificial Sequence: Synthetic primer
gaagacccagaggattttag

SEQ ID NO: 1429 - DNA, 20 bp, Artificial Sequence
  Description of Artificial Sequence: Synthetic primer
ggacagaattttggaaacgg

SEQ ID NO: 1430 - DNA, 20 bp, Artificial Sequence
  Description of Artificial Sequence: Synthetic primer
attttccaggtcaggaatgg

SEQ ID NO: 1431 - DNA, 20 bp, Artificial Sequence
  Description of Artificial Sequence: Synthetic primer
agtcagtcccaaccttcagt

SEQ ID NO: 1432 - DNA, 20 bp, Artificial Sequence
  Description of Artificial Sequence: Synthetic primer
agttattcatggagtccacg

SEQ ID NO: 1433 - DNA, 20 bp, Artificial Sequence
  Description of Artificial Sequence: Synthetic primer
gagtccatttatccttcccc

SEQ ID NO: 1434 - DNA, 20 bp, Artificial Sequence
  Description of Artificial Sequence: Synthetic primer
aagtcctgactggttgtatg

SEQ ID NO: 1435 - DNA, 20 bp, Artificial Sequence
  Description of Artificial Sequence: Synthetic primer
atgcccatctctgctcccaa

SEQ ID NO: 1436 - DNA, 20 bp, Artificial Sequence
  Description of Artificial Sequence: Synthetic primer
attccattctccacatgccc

SEQ ID NO: 1437 - DNA, 20 bp, Artificial Sequence
  Description of Artificial Sequence: Synthetic primer
attgaaagggagatgctagg

SEQ ID NO: 1438 - DNA, 20 bp, Artificial Sequence
  Description of Artificial Sequence: Synthetic primer
agtcacctagaaaccagcag

SEQ ID NO: 1439 - DNA, 20 bp, Artificial Sequence
  Description of Artificial Sequence: Synthetic primer
caatatgatgctgtgagaag

SEQ ID NO: 1440 - DNA, 20 bp, Artificial Sequence
  Description of Artificial Sequence: Synthetic primer
atcttacaatggaggagctg

SEQ ID NO: 1441 - DNA, 20 bp, Artificial Sequence
  Description of Artificial Sequence: Synthetic primer
atcttacaatggaggagctg

SEQ ID NO: 1442 - DNA, 20 bp, Artificial Sequence
  Description of Artificial Sequence: Synthetic primer
ctgctggtcttgtgtctttc

SEQ ID NO: 1443 - DNA, 20 bp, Artificial Sequence
  Description of Artificial Sequence: Synthetic primer
ggcttgagagttggatgatg

SEQ ID NO: 1444 - DNA, 20 bp, Artificial Sequence
  Description of Artificial Sequence: Synthetic primer
agagcaaaacaggcctggag

SEQ ID NO: 1445 - DNA, 20 bp, Artificial Sequence
  Description of Artificial Sequence: Synthetic primer
atttcgttccaagagactcc

SEQ ID NO: 1446 - DNA, 20 bp, Artificial Sequence
  Description of Artificial Sequence: Synthetic primer
ttatctccctggacatatgc

SEQ ID NO: 1447 - DNA, 20 bp, Artificial Sequence
  Description of Artificial Sequence: Synthetic primer
caggttgtcctaataatggg

SEQ ID NO: 1448 - DNA, 20 bp, Artificial Sequence
  Description of Artificial Sequence: Synthetic primer
catgacagaggcagctcttc

SEQ ID NO: 1449 - DNA, 20 bp, Artificial Sequence
  Description of Artificial Sequence: Synthetic primer
ggccacaaaggaccttaaag

SEQ ID NO: 1450 - DNA, 20 bp, Artificial Sequence
  Description of Artificial Sequence: Synthetic primer
agtaggatgtggcctatgag

SEQ ID NO: 1451 - DNA, 20 bp, Artificial Sequence
  Description of Artificial Sequence: Synthetic primer
catgatcctatcaagccatc

SEQ ID NO: 1452 - DNA, 20 bp, Artificial Sequence
  Description of Artificial Sequence: Synthetic primer
gccagtccaagaccacacag

SEQ ID NO: 1453 - DNA, 20 bp, Artificial Sequence
  Description of Artificial Sequence: Synthetic primer
cccggaacattaacacatgc

SEQ ID NO: 1454 - DNA, 20 bp, Artificial Sequence
  Description of Artificial Sequence: Synthetic primer
ggacaggaaagatgaagctg

SEQ ID NO: 1455 - DNA, 20 bp, Artificial Sequence
  Description of Artificial Sequence: Synthetic primer
ggacaggaaagatgaagctg

SEQ ID NO: 1456 - DNA, 20 bp, Artificial Sequence
  Description of Artificial Sequence: Synthetic primer
attgggagcctctgaatcac

SEQ ID NO: 1457 - DNA, 20 bp, Artificial Sequence
  Description of Artificial Sequence: Synthetic primer
gtgctttttaagcacttaat

SEQ ID NO: 1458 - DNA, 20 bp, Artificial Sequence
  Description of Artificial Sequence: Synthetic primer
cactgtgttccgtggttttg

SEQ ID NO: 1459 - DNA, 20 bp, Artificial Sequence
  Description of Artificial Sequence: Synthetic primer
gagatggtaactgaagctcc

SEQ ID NO: 1460 - DNA, 20 bp, Artificial Sequence
  Description of Artificial Sequence: Synthetic primer
tgccaagagaagcaccaaag

SEQ ID NO: 1461 - DNA, 20 bp, Artificial Sequence
  Description of Artificial Sequence: Synthetic primer
agagaagcatcccagaaaaa

SEQ ID NO: 1462 - DNA, 20 bp, Artificial Sequence
  Description of Artificial Sequence: Synthetic primer
gcaatcacaggcgaattccc

SEQ ID NO: 1463 - DNA, 20 bp, Artificial Sequence
  Description of Artificial Sequence: Synthetic primer
tccccagtttcctcagtgtc

SEQ ID NO: 1464 - DNA, 20 bp, Artificial Sequence
  Description of Artificial Sequence: Synthetic primer
tccccagtttcctcagtgtc

SEQ ID NO: 1465 - DNA, 20 bp, Artificial Sequence
  Description of Artificial Sequence: Synthetic primer
tgccaaagattatgggaggg

SEQ ID NO: 1466 - DNA, 20 bp, Artificial Sequence
  Description of Artificial Sequence: Synthetic primer
ctttctcgggcctcagtagt

SEQ ID NO: 1467 - DNA, 20 bp, Artificial Sequence
  Description of Artificial Sequence: Synthetic primer
agtgcattcagttctgggcc

SEQ ID NO: 1468 - DNA, 20 bp, Artificial Sequence
  Description of Artificial Sequence: Synthetic primer
aggagagtagttcttggtgg

SEQ ID NO: 1469 - DNA, 20 bp, Artificial Sequence
  Description of Artificial Sequence: Synthetic primer
ttctctccattgacatcccc

SEQ ID NO: 1470 - DNA, 20 bp, Artificial Sequence
  Description of Artificial Sequence: Synthetic primer
actattgttccaactagagg

SEQ ID NO: 1471 - DNA, 20 bp, Artificial Sequence
  Description of Artificial Sequence: Synthetic primer
agtttgggagttagaagact

SEQ ID NO: 1472 - DNA, 21 bp, Artificial Sequence
  Description of Artificial Sequence: Synthetic primer
ttcctggggaatagcctggcc

SEQ ID NO: 1473 - DNA, 20 bp, Artificial Sequence
  Description of Artificial Sequence: Synthetic primer
tgggaggacaggagttctag

SEQ ID NO: 1474 - DNA, 21 bp, Artificial Sequence
  Description of Artificial Sequence: Synthetic primer
tgttcaggaagaaatccgtgt

SEQ ID NO: 1475 - DNA, 20 bp, Artificial Sequence
  Description of Artificial Sequence: Synthetic primer
tgcctggcagtacacagaac

SEQ ID NO: 1476 - DNA, 20 bp, Artificial Sequence
  Description of Artificial Sequence: Synthetic primer
cctgtaggcatgtgtgtaaa

SEQ ID NO: 1477 - DNA, 20 bp, Artificial Sequence
  Description of Artificial Sequence: Synthetic primer
cagatggtacacattcccag

SEQ ID NO: 1478 - DNA, 20 bp, Artificial Sequence
  Description of Artificial Sequence: Synthetic primer
cagatggtacacattcccag

SEQ ID NO: 1479 - DNA, 20 bp, Artificial Sequence
  Description of Artificial Sequence: Synthetic primer
acacatgcctacaggtatgc

SEQ ID NO: 1480 - DNA, 20 bp, Artificial Sequence
  Description of Artificial Sequence: Synthetic primer
caggcacacagatggtacac

SEQ ID NO: 1481 - DNA, 20 bp, Artificial Sequence
  Description of Artificial Sequence: Synthetic primer
caggcacacagatggtacac

SEQ ID NO: 1482 - DNA, 20 bp, Artificial Sequence
  Description of Artificial Sequence: Synthetic primer
tggcccttgctgtcacatct

SEQ ID NO: 1483 - DNA, 20 bp, Artificial Sequence
  Description of Artificial Sequence: Synthetic primer
aggggtggcatccctgccca

SEQ ID NO: 1484 - DNA, 19 bp, Artificial Sequence
  Description of Artificial Sequence: Synthetic primer
tgcacccactgtaaaaagt

SEQ ID NO: 1485 - DNA, 20 bp, Artificial Sequence
  Description of Artificial Sequence: Synthetic primer
agtgggtgcaaaggtaattg

SEQ ID NO: 1486 - DNA, 20 bp, Artificial Sequence
  Description of Artificial Sequence: Synthetic primer
atgtagccctattaggggtg

SEQ ID NO: 1487 - DNA, 20 bp, Artificial Sequence
  Description of Artificial Sequence: Synthetic primer
cccgggagtttgaggctata

SEQ ID NO: 1488 - DNA, 20 bp, Artificial Sequence
  Description of Artificial Sequence: Synthetic primer
tactcttgagtaatggtgac

SEQ ID NO: 1489 - DNA, 20 bp, Artificial Sequence
  Description of Artificial Sequence: Synthetic primer
cgaatcatggacataaatcc

SEQ ID NO: 1490 - DNA, 20 bp, Artificial Sequence
  Description of Artificial Sequence: Synthetic primer
acagtagccttgctgaagcc

SEQ ID NO: 1491 - DNA, 20 bp, Artificial Sequence
  Description of Artificial Sequence: Synthetic primer
tcttaggattgctgctcctg

SEQ ID NO: 1492 - DNA, 20 bp, Artificial Sequence
  Description of Artificial Sequence: Synthetic primer
tccccagtcctgtaaacagc

SEQ ID NO: 1493 - DNA, 20 bp, Artificial Sequence
  Description of Artificial Sequence: Synthetic primer
attgtgtcatttggctccac

SEQ ID NO: 1494 - DNA, 20 bp, Artificial Sequence
  Description of Artificial Sequence: Synthetic primer
ttgtgtcatttggctccacc

SEQ ID NO: 1495 - DNA, 20 bp, Artificial Sequence
  Description of Artificial Sequence: Synthetic primer
cactgttttggaaagctggg

SEQ ID NO: 1496 - DNA, 20 bp, Artificial Sequence
  Description of Artificial Sequence: Synthetic primer
atttagtattgtcctggcac

SEQ ID NO: 1497 - DNA, 20 bp, Artificial Sequence
  Description of Artificial Sequence: Synthetic primer
gggataacttgctgaaggtc

SEQ ID NO: 1498 - DNA, 19 bp, Artificial Sequence
  Description of Artificial Sequence: Synthetic primer
agacaccttccagagagga

SEQ ID NO: 1499 - DNA, 20 bp, Artificial Sequence
  Description of Artificial Sequence: Synthetic primer
tcttccatctggtgagtctg

SEQ ID NO: 1500 - DNA, 19 bp, Artificial Sequence
  Description of Artificial Sequence: Synthetic primer
ccacccagaacatctctgc

SEQ ID NO: 1501 - DNA, 20 bp, Artificial Sequence
  Description of Artificial Sequence: Synthetic primer
ctagccttcagagagctaac

SEQ ID NO: 1502 - DNA, 20 bp, Artificial Sequence
  Description of Artificial Sequence: Synthetic primer
tggcccagagggaagcatca

SEQ ID NO: 1503 - DNA, 20 bp, Artificial Sequence
  Description of Artificial Sequence: Synthetic primer
tggcccagagggaagcatca

SEQ ID NO: 1504 - DNA, 20 bp, Artificial Sequence
  Description of Artificial Sequence: Synthetic primer
accagggccctccaatccat

SEQ ID NO: 1505 - DNA, 20 bp, Artificial Sequence
  Description of Artificial Sequence: Synthetic primer
ctgcagcttctccacttgct

SEQ ID NO: 1506 - DNA, 20 bp, Artificial Sequence
  Description of Artificial Sequence: Synthetic primer
agggagggtgaagagaggga

SEQ ID NO: 1507 - DNA, 20 bp, Artificial Sequence
  Description of Artificial Sequence: Synthetic primer
agagtagttctgtgtccctc

SEQ ID NO: 1508 - DNA, 20 bp, Artificial Sequence
  Description of Artificial Sequence: Synthetic primer
ttggatctgctggttctgag

SEQ ID NO: 1509 - DNA, 20 bp, Artificial Sequence
  Description of Artificial Sequence: Synthetic primer
ttgctcatgacctaggcatc

SEQ ID NO: 1510 - DNA, 20 bp, Artificial Sequence
  Description of Artificial Sequence: Synthetic primer
gaaatgtgctggaaagcagg

SEQ ID NO: 1511 - DNA, 20 bp, Artificial Sequence
  Description of Artificial Sequence: Synthetic primer
ccttgagtccagctgcaatg

SEQ ID NO: 1512 - DNA, 20 bp, Artificial Sequence
  Description of Artificial Sequence: Synthetic primer
atggacattactgtaccgac

SEQ ID NO: 1513 - DNA, 20 bp, Artificial Sequence
  Description of Artificial Sequence: Synthetic primer
aaataaggcccctggtgtcc

SEQ ID NO: 1514 - DNA, 20 bp, Artificial Sequence
  Description of Artificial Sequence: Synthetic primer
ctgcctctttagcagctttg

SEQ ID NO: 1515 - DNA, 20 bp, Artificial Sequence
  Description of Artificial Sequence: Synthetic primer
ctgcctctttagcagctttg

SEQ ID NO: 1516 - DNA, 20 bp, Artificial Sequence
  Description of Artificial Sequence: Synthetic primer
ctgcctctttagcagctttg

SEQ ID NO: 1517 - DNA, 20 bp, Artificial Sequence
  Description of Artificial Sequence: Synthetic primer
cacagggcatgcctggtctt

SEQ ID NO: 1518 - DNA, 20 bp, Artificial Sequence
  Description of Artificial Sequence: Synthetic primer
tgaacaagcagtgggaccag

SEQ ID NO: 1519 - DNA, 20 bp, Artificial Sequence
  Description of Artificial Sequence: Synthetic primer
ttttaccttgccaggaaagc

SEQ ID NO: 1520 - DNA, 20 bp, Artificial Sequence
  Description of Artificial Sequence: Synthetic primer
ccagcatcttcaccttcttc

SEQ ID NO: 1521 - DNA, 20 bp, Artificial Sequence
  Description of Artificial Sequence: Synthetic primer
ttttggtgaaggctcctctg

SEQ ID NO: 1522 - DNA, 20 bp, Artificial Sequence
  Description of Artificial Sequence: Synthetic primer
aattatctcacccagtctcg

SEQ ID NO: 1523 - DNA, 20 bp, Artificial Sequence
  Description of Artificial Sequence: Synthetic primer
acagctcttccttacaaaag

SEQ ID NO: 1524 - DNA, 20 bp, Artificial Sequence
  Description of Artificial Sequence: Synthetic primer
aatagtctagagagttcccc

SEQ ID NO: 1525 - DNA, 20 bp, Artificial Sequence
  Description of Artificial Sequence: Synthetic primer
ccctggacaggtctctttac

SEQ ID NO: 1526 - DNA, 20 bp, Artificial Sequence
  Description of Artificial Sequence: Synthetic primer
agagtttacccaggacatgc

SEQ ID NO: 1527 - DNA, 20 bp, Artificial Sequence
  Description of Artificial Sequence: Synthetic primer
gtgctgggactagaggatag

SEQ ID NO: 1528 - DNA, 20 bp, Artificial Sequence
  Description of Artificial Sequence: Synthetic primer
tgggaaccactctctaagac

SEQ ID NO: 1529 - DNA, 20 bp, Artificial Sequence
  Description of Artificial Sequence: Synthetic primer
atgaagccacagtgactacc

SEQ ID NO: 1530 - DNA, 20 bp, Artificial Sequence
  Description of Artificial Sequence: Synthetic primer
aaccaaggatgctacagaag

SEQ ID NO: 1531 - DNA, 20 bp, Artificial Sequence
  Description of Artificial Sequence: Synthetic primer
ttgcctgtcccttccatctt

SEQ ID NO: 1532 - DNA, 20 bp, Artificial Sequence
  Description of Artificial Sequence: Synthetic primer
tgggatggaggtaaacagag

SEQ ID NO: 1533 - DNA, 20 bp, Artificial Sequence
  Description of Artificial Sequence: Synthetic primer
ctggtgaaatacatcaccac

SEQ ID NO: 1534 - DNA, 20 bp, Artificial Sequence
  Description of Artificial Sequence: Synthetic primer
cttttggatggccaaggatg

SEQ ID NO: 1535 - DNA, 20 bp, Artificial Sequence
  Description of Artificial Sequence: Synthetic primer
agctggtacccaccagatga

SEQ ID NO: 1536 - DNA, 20 bp, Artificial Sequence
  Description of Artificial Sequence: Synthetic primer
cagggacttgattggagtct

SEQ ID NO: 1537 - DNA, 20 bp, Artificial Sequence
  Description of Artificial Sequence: Synthetic primer
tcagagaaggggtgaggagt

SEQ ID NO: 1538 - DNA, 20 bp, Artificial Sequence
  Description of Artificial Sequence: Synthetic primer
agaaatcagtgctgcacacc

SEQ ID NO: 1539 - DNA, 20 bp, Artificial Sequence
  Description of Artificial Sequence: Synthetic primer
tgaacttaccgcagcctctc

SEQ ID NO: 1540 - DNA, 19 bp, Artificial Sequence
  Description of Artificial Sequence: Synthetic primer
tccatcccttctccttcat

SEQ ID NO: 1541 - DNA, 20 bp, Artificial Sequence
  Description of Artificial Sequence: Synthetic primer
ttccacaaactttgagctgg

SEQ ID NO: 1542 - DNA, 20 bp, Artificial Sequence
  Description of Artificial Sequence: Synthetic primer
tctgctagaaggtaagcttg

SEQ ID NO: 1543 - DNA, 21 bp, Artificial Sequence
  Description of Artificial Sequence: Synthetic primer
atagatcctaggccccttaaa

SEQ ID NO: 1544 - DNA, 20 bp, Artificial Sequence
  Description of Artificial Sequence: Synthetic primer
cttagccttgtgggctttag

SEQ ID NO: 1545 - DNA, 20 bp, Artificial Sequence
  Description of Artificial Sequence: Synthetic primer
tcccgtatttccccatttcc

SEQ ID NO: 1546 - DNA, 20 bp, Artificial Sequence
  Description of Artificial Sequence: Synthetic primer
ccttatcctgttcatcaccc

SEQ ID NO: 1547 - DNA, 19 bp, Artificial Sequence
  Description of Artificial Sequence: Synthetic primer
ctgcaggtgcagcatcagg

SEQ ID NO: 1548 - DNA, 20 bp, Artificial Sequence
  Description of Artificial Sequence: Synthetic primer
tcaggccttggtgaagagtg

SEQ ID NO: 1549 - DNA, 20 bp, Artificial Sequence
  Description of Artificial Sequence: Synthetic primer
aagttctgctcatccttccc

SEQ ID NO: 1550 - DNA, 20 bp, Artificial Sequence
  Description of Artificial Sequence: Synthetic primer
tctggaggaatggcaatgac

SEQ ID NO: 1551 - DNA, 20 bp, Artificial Sequence
  Description of Artificial Sequence: Synthetic primer
atgcttgtgttcactggttg

SEQ ID NO: 1552 - DNA, 20 bp, Artificial Sequence
  Description of Artificial Sequence: Synthetic primer
gcacctattgctcgcataac

SEQ ID NO: 1553 - DNA, 21 bp, Artificial Sequence
  Description of Artificial Sequence: Synthetic primer
aaggcccagggccctgtaaga

SEQ ID NO: 1554 - DNA, 20 bp, Artificial Sequence
  Description of Artificial Sequence: Synthetic primer
aaatcacctgtcttacaggg

SEQ ID NO: 1555 - DNA, 20 bp, Artificial Sequence
  Description of Artificial Sequence: Synthetic primer
atatgtgagcgagaagcacc

SEQ ID NO: 1556 - DNA, 20 bp, Artificial Sequence
  Description of Artificial Sequence: Synthetic primer
atgacaggcttgtcgagaat

SEQ ID NO: 1557 - DNA, 20 bp, Artificial Sequence
  Description of Artificial Sequence: Synthetic primer
tgctggttcaaggtcagcta

SEQ ID NO: 1558 - DNA, 20 bp, Artificial Sequence
  Description of Artificial Sequence: Synthetic primer
ttctcagatcagttcactcc

SEQ ID NO: 1559 - DNA, 20 bp, Artificial Sequence
  Description of Artificial Sequence: Synthetic primer
gattgcatagttcagcatcc

SEQ ID NO: 1560 - DNA, 20 bp, Artificial Sequence
  Description of Artificial Sequence: Synthetic primer
caaatgtcacagcatctccc

SEQ ID NO: 1561 - DNA, 20 bp, Artificial Sequence
  Description of Artificial Sequence: Synthetic primer
cataaaagccccatatcccc

SEQ ID NO: 1562 - DNA, 20 bp, Artificial Sequence
  Description of Artificial Sequence: Synthetic primer
gccttggggtctttatcagc

SEQ ID NO: 1563 - DNA, 20 bp, Artificial Sequence
  Description of Artificial Sequence: Synthetic primer
atgaatggaagggtagcctg

SEQ ID NO: 1564 - DNA, 20 bp, Artificial Sequence
  Description of Artificial Sequence: Synthetic primer
ttccaaaagctcccctagag

SEQ ID NO: 1565 - DNA, 20 bp, Artificial Sequence
  Description of Artificial Sequence: Synthetic primer
catctctcgtgccccagaaa

SEQ ID NO: 1566 - DNA, 20 bp, Artificial Sequence
  Description of Artificial Sequence: Synthetic primer
tacatggtgcatagagacag

SEQ ID NO: 1567 - DNA, 20 bp, Artificial Sequence
  Description of Artificial Sequence: Synthetic primer
tgctgataattcctcagcac

SEQ ID NO: 1568 - DNA, 20 bp, Artificial Sequence
  Description of Artificial Sequence: Synthetic primer
gaggattcctgatgaaacag

SEQ ID NO: 1569 - DNA, 20 bp, Artificial Sequence
  Description of Artificial Sequence: Synthetic primer
attttacaagggagaaactg

SEQ ID NO: 1570 - DNA, 20 bp, Artificial Sequence
  Description of Artificial Sequence: Synthetic primer
ctgactttgcatcttggctc

SEQ ID NO: 1571 - DNA, 20 bp, Artificial Sequence
  Description of Artificial Sequence: Synthetic primer
caccatactcacacagccag

SEQ ID NO: 1572 - DNA, 20 bp, Artificial Sequence
  Description of Artificial Sequence: Synthetic primer
cccttctcccaaagactgac

SEQ ID NO: 1573 - DNA, 20 bp, Artificial Sequence
  Description of Artificial Sequence: Synthetic primer
actgtttcttagttcggtgg

SEQ ID NO: 1574 - DNA, 20 bp, Artificial Sequence
  Description of Artificial Sequence: Synthetic primer
tgaggacagaggcaagcaga

SEQ ID NO: 1575 - DNA, 20 bp, Artificial Sequence
  Description of Artificial Sequence: Synthetic primer
tcaagaacagtgaaacagag

SEQ ID NO: 1576 - DNA, 20 bp, Artificial Sequence
  Description of Artificial Sequence: Synthetic primer
catgccttcatgtggtgttg

SEQ ID NO: 1577 - DNA, 20 bp, Artificial Sequence
  Description of Artificial Sequence: Synthetic primer
tccagagagggttttcccac

SEQ ID NO: 1578 - DNA, 20 bp, Artificial Sequence
  Description of Artificial Sequence: Synthetic primer
aatcccatggcacaccacag

SEQ ID NO: 1579 - DNA, 20 bp, Artificial Sequence
  Description of Artificial Sequence: Synthetic primer
ggactggaggtcatcataac

SEQ ID NO: 1580 - DNA, 20 bp, Artificial Sequence
  Description of Artificial Sequence: Synthetic primer
tttgttctaccactaaccag

SEQ ID NO: 1581 - DNA, 20 bp, Artificial Sequence
  Description of Artificial Sequence: Synthetic primer
tttgtccagcttctgtgtac

SEQ ID NO: 1582 - DNA, 20 bp, Artificial Sequence
  Description of Artificial Sequence: Synthetic primer
gaatcatcaagaagggactg

SEQ ID NO: 1583 - DNA, 20 bp, Artificial Sequence
  Description of Artificial Sequence: Synthetic primer
aagctggtctcaaactcctg

SEQ ID NO: 1584 - DNA, 20 bp, Artificial Sequence
  Description of Artificial Sequence: Synthetic primer
ttgttggtggctgatgaagg

SEQ ID NO: 1585 - DNA, 20 bp, Artificial Sequence
  Description of Artificial Sequence: Synthetic primer
atgattttcccatgactggc

SEQ ID NO: 1586 - DNA, 20 bp, Artificial Sequence
  Description of Artificial Sequence: Synthetic primer
aatctgaagagtgactgtcc

SEQ ID NO: 1587 - DNA, 20 bp, Artificial Sequence
  Description of Artificial Sequence: Synthetic primer
cctttgccgactttggtttc

SEQ ID NO: 1588 - DNA, 20 bp, Artificial Sequence
  Description of Artificial Sequence: Synthetic primer
aagattaccccactgcactc

SEQ ID NO: 1589 - DNA, 20 bp, Artificial Sequence
  Description of Artificial Sequence: Synthetic primer
agcactcagaatactacctg

SEQ ID NO: 1590 - DNA, 20 bp, Artificial Sequence
  Description of Artificial Sequence: Synthetic primer
tctgctatcaccttgttccc

SEQ ID NO: 1591 - DNA, 20 bp, Artificial Sequence
  Description of Artificial Sequence: Synthetic primer
agctggattcagagcctttg

SEQ ID NO: 1592 - DNA, 20 bp, Artificial Sequence
  Description of Artificial Sequence: Synthetic primer
gttcctcatccagtccttac

SEQ ID NO: 1593 - DNA, 20 bp, Artificial Sequence
  Description of Artificial Sequence: Synthetic primer
agaaggacagttgcaacagg

SEQ ID NO: 1594 - DNA, 20 bp, Artificial Sequence
  Description of Artificial Sequence: Synthetic primer
ctttcttgaaatgctcaggg

SEQ ID NO: 1595 - DNA, 20 bp, Artificial Sequence
  Description of Artificial Sequence: Synthetic primer
atagaccagggaactgagac

SEQ ID NO: 1596 - DNA, 20 bp, Artificial Sequence
  Description of Artificial Sequence: Synthetic primer
aatgtggctgttatggtagg

SEQ ID NO: 1597 - DNA, 20 bp, Artificial Sequence
  Description of Artificial Sequence: Synthetic primer
aatgtggctgttatggtagg

SEQ ID NO: 1598 - DNA, 20 bp, Artificial Sequence
  Description of Artificial Sequence: Synthetic primer
accataagagagaaaagccc

SEQ ID NO: 1599 - DNA, 20 bp, Artificial Sequence
  Description of Artificial Sequence: Synthetic primer
tttctctcctgtgtgtattc

SEQ ID NO: 1600 - DNA, 20 bp, Artificial Sequence
  Description of Artificial Sequence: Synthetic primer
cactgaaagctctctcacac

SEQ ID NO: 1601 - DNA, 21 bp, Artificial Sequence
  Description of Artificial Sequence: Synthetic primer
gtataaggtttctctctagtg

SEQ ID NO: 1602 - DNA, 20 bp, Artificial Sequence
  Description of Artificial Sequence: Synthetic primer
ttcactgtggaccacaaagg

SEQ ID NO: 1603 - DNA, 20 bp, Artificial Sequence
  Description of Artificial Sequence: Synthetic primer
gggtaattgtacccaccaag

SEQ ID NO: 1604 - DNA, 20 bp, Artificial Sequence
  Description of Artificial Sequence: Synthetic primer
taaaaaggaattcttggtgg

SEQ ID NO: 1605 - DNA, 20 bp, Artificial Sequence
  Description of Artificial Sequence: Synthetic primer
cagactggcaggagtacatt

SEQ ID NO: 1606 - DNA, 20 bp, Artificial Sequence
  Description of Artificial Sequence: Synthetic primer
ccatcttgcttctttccctg

SEQ ID NO: 1607 - DNA, 20 bp, Artificial Sequence
  Description of Artificial Sequence: Synthetic primer
ttatatccagggaaagaagc

SEQ ID NO: 1608 - DNA, 20 bp, Artificial Sequence
  Description of Artificial Sequence: Synthetic primer
gactcatcaaatggagaatg

SEQ ID NO: 1609 - DNA, 20 bp, Artificial Sequence
  Description of Artificial Sequence: Synthetic primer
atgatgaagttgtcttcagg

SEQ ID NO: 1610 - DNA, 20 bp, Artificial Sequence
  Description of Artificial Sequence: Synthetic primer
ccacagcaaagacaaaaggg

SEQ ID NO: 1611 - DNA, 20 bp, Artificial Sequence
  Description of Artificial Sequence: Synthetic primer
tcctcacattaacccaggag

SEQ ID NO: 1612 - DNA, 20 bp, Artificial Sequence
  Description of Artificial Sequence: Synthetic primer
aaaatctccctgtgtctgcc

SEQ ID NO: 1613 - DNA, 20 bp, Artificial Sequence
  Description of Artificial Sequence: Synthetic primer
tcaacccggacaacaaaacc

SEQ ID NO: 1614 - DNA, 20 bp, Artificial Sequence
  Description of Artificial Sequence: Synthetic primer
atgggtgagtctccctttac

SEQ ID NO: 1615 - DNA, 20 bp, Artificial Sequence
  Description of Artificial Sequence: Synthetic primer
atggtagtgtgtttgtttgc

SEQ ID NO: 1616 - DNA, 20 bp, Artificial Sequence
  Description of Artificial Sequence: Synthetic primer
cctgtaatccctgcactttg

SEQ ID NO: 1617 - DNA, 20 bp, Artificial Sequence
  Description of Artificial Sequence: Synthetic primer
caagacttccaagtgcatcc

SEQ ID NO: 1618 - DNA, 20 bp, Artificial Sequence
  Description of Artificial Sequence: Synthetic primer
cctgagaccctatgacttta

SEQ ID NO: 1619 - DNA, 20 bp, Artificial Sequence
  Description of Artificial Sequence: Synthetic primer
tgactctcctagttcttcag

SEQ ID NO: 1620 - DNA, 20 bp, Artificial Sequence
  Description of Artificial Sequence: Synthetic primer
agggttctccagagaaacag

SEQ ID NO: 1621 - DNA, 20 bp, Artificial Sequence
  Description of Artificial Sequence: Synthetic primer
tctagccaaactcctatgtg

SEQ ID NO: 1622 - DNA, 20 bp, Artificial Sequence
  Description of Artificial Sequence: Synthetic primer
tcaggtgaaaccaactgaag

SEQ ID NO: 1623 - DNA, 20 bp, Artificial Sequence
  Description of Artificial Sequence: Synthetic primer
ctagactctaggtaggacac

SEQ ID NO: 1624 - DNA, 20 bp, Artificial Sequence
  Description of Artificial Sequence: Synthetic primer
tgggaaaggaagggaatgtc

SEQ ID NO: 1625 - DNA, 20 bp, Artificial Sequence
  Description of Artificial Sequence: Synthetic primer
acagtagacacacaggataa

SEQ ID NO: 1626 - DNA, 20 bp, Artificial Sequence
  Description of Artificial Sequence: Synthetic primer
atttccaccctgggcacttc

SEQ ID NO: 1627 - DNA, 20 bp, Artificial Sequence
  Description of Artificial Sequence: Synthetic primer
ccaaaaaggaggaatgtggg

SEQ ID NO: 1628 - DNA, 20 bp, Artificial Sequence
  Description of Artificial Sequence: Synthetic primer
ccaccctgttcttactgtag

SEQ ID NO: 1629 - DNA, 20 bp, Artificial Sequence
  Description of Artificial Sequence: Synthetic primer
ttgggcaaggcgtgtttcct

SEQ ID NO: 1630 - DNA, 20 bp, Artificial Sequence
  Description of Artificial Sequence: Synthetic primer
ctggccaagcgataacacta

SEQ ID NO: 1631 - DNA, 20 bp, Artificial Sequence
  Description of Artificial Sequence: Synthetic primer
agtggctgctttcggaacag

SEQ ID NO: 1632 - DNA, 20 bp, Artificial Sequence
  Description of Artificial Sequence: Synthetic primer
aaatgggcaacatggcaaag

SEQ ID NO: 1633 - DNA, 20 bp, Artificial Sequence
  Description of Artificial Sequence: Synthetic primer
ctgtgttccagcatcatctg

SEQ ID NO: 1634 - DNA, 20 bp, Artificial Sequence
  Description of Artificial Sequence: Synthetic primer
aaggacagccaattaacacg

SEQ ID NO: 1635 - DNA, 20 bp, Artificial Sequence
  Description of Artificial Sequence: Synthetic primer
aaggatgcctatgtgaccag

SEQ ID NO: 1636 - DNA, 20 bp, Artificial Sequence
  Description of Artificial Sequence: Synthetic primer
acatcgaccctttgttgtac

SEQ ID NO: 1637 - DNA, 20 bp, Artificial Sequence
  Description of Artificial Sequence: Synthetic primer
ttaggaatgaaaagccacag

SEQ ID NO: 1638 - DNA, 20 bp, Artificial Sequence
  Description of Artificial Sequence: Synthetic primer
acaggtggacaactgagatc

SEQ ID NO: 1639 - DNA, 20 bp, Artificial Sequence
  Description of Artificial Sequence: Synthetic primer
aaaatgtagagagatgcccg

SEQ ID NO: 1640 - DNA, 20 bp, Artificial Sequence
  Description of Artificial Sequence: Synthetic primer
ctggcttagaagcagaaaat

SEQ ID NO: 1641 - DNA, 20 bp, Artificial Sequence
  Description of Artificial Sequence: Synthetic primer
ggcactggagatcactaatc

SEQ ID NO: 1642 - DNA, 20 bp, Artificial Sequence
  Description of Artificial Sequence: Synthetic primer
caaaccacctggcttagaag

SEQ ID NO: 1643 - DNA, 19 bp, Artificial Sequence
  Description of Artificial Sequence: Synthetic primer
cacagggagcaaatttatt

SEQ ID NO: 1644 - DNA, 20 bp, Artificial Sequence
  Description of Artificial Sequence: Synthetic primer
gcctgtagaaaaaggttagc

SEQ ID NO: 1645 - DNA, 20 bp, Artificial Sequence
  Description of Artificial Sequence: Synthetic primer
gctaacctttttctacaggc

SEQ ID NO: 1646 - DNA, 20 bp, Artificial Sequence
  Description of Artificial Sequence: Synthetic primer
ttttctacaggcatgtcagc

SEQ ID NO: 1647 - DNA, 20 bp, Artificial Sequence
  Description of Artificial Sequence: Synthetic primer
gaaaaccccattctgggtag

SEQ ID NO: 1648 - DNA, 20 bp, Artificial Sequence
  Description of Artificial Sequence: Synthetic primer
aatttccagaggaccatcgc

SEQ ID NO: 1649 - DNA, 20 bp, Artificial Sequence
  Description of Artificial Sequence: Synthetic primer
cgccaggtgtttttaaaacc

SEQ ID NO: 1650 - DNA, 20 bp, Artificial Sequence
  Description of Artificial Sequence: Synthetic primer
tccattacagccagggcaag

SEQ ID NO: 1651 - DNA, 20 bp, Artificial Sequence
  Description of Artificial Sequence: Synthetic primer
ttccatcagttctagggagc

SEQ ID NO: 1652 - DNA, 20 bp, Artificial Sequence
  Description of Artificial Sequence: Synthetic primer
ataagcaaatctgggcagag

SEQ ID NO: 1653 - DNA, 20 bp, Artificial Sequence
  Description of Artificial Sequence: Synthetic primer
tgaaatcccagccgcctagc

SEQ ID NO: 1654 - DNA, 21 bp, Artificial Sequence
  Description of Artificial Sequence: Synthetic primer
tttcaagccctcgggtgtgac

SEQ ID NO: 1655 - DNA, 20 bp, Artificial Sequence
  Description of Artificial Sequence: Synthetic primer
tcactcaccttcgacttctc

SEQ ID NO: 1656 - DNA, 20 bp, Artificial Sequence
  Description of Artificial Sequence: Synthetic primer
agaatgactaagggaggaag

SEQ ID NO: 1657 - DNA, 20 bp, Artificial Sequence
  Description of Artificial Sequence: Synthetic primer
agaatgactaagggaggaag

SEQ ID NO: 1658 - DNA, 20 bp, Artificial Sequence
  Description of Artificial Sequence: Synthetic primer
agtgttctgcactgtcactc

SEQ ID NO: 1659 - DNA, 20 bp, Artificial Sequence
  Description of Artificial Sequence: Synthetic primer
aatgaggacagtgggtcctg

SEQ ID NO: 1660 - DNA, 20 bp, Artificial Sequence
  Description of Artificial Sequence: Synthetic primer
ataagcatgctgggtcatcc

SEQ ID NO: 1661 - DNA, 20 bp, Artificial Sequence
  Description of Artificial Sequence: Synthetic primer
tttgagtctatccctacacc

SEQ ID NO: 1662 - DNA, 20 bp, Artificial Sequence
  Description of Artificial Sequence: Synthetic primer
agggatagactcaaagcgag

SEQ ID NO: 1663 - DNA, 20 bp, Artificial Sequence
  Description of Artificial Sequence: Synthetic primer
ctaaaatcctctgggtcttc

SEQ ID NO: 1664 - DNA, 20 bp, Artificial Sequence
  Description of Artificial Sequence: Synthetic primer
ccaaaactgaaggttgggac

SEQ ID NO: 1665 - DNA, 20 bp, Artificial Sequence
  Description of Artificial Sequence: Synthetic primer
cagggcccaattgtatcttc

SEQ ID NO: 1666 - DNA, 20 bp, Artificial Sequence
  Description of Artificial Sequence: Synthetic primer
ttttggaagggtcaaagaag

SEQ ID NO: 1667 - DNA, 20 bp, Artificial Sequence
  Description of Artificial Sequence: Synthetic primer
acgtggactccatgaataac

SEQ ID NO: 1668 - DNA, 20 bp, Artificial Sequence
  Description of Artificial Sequence: Synthetic primer
ctcagagagaataggatggg

SEQ ID NO: 1669 - DNA, 20 bp, Artificial Sequence
  Description of Artificial Sequence: Synthetic primer
tcctaacccagagctaagac

SEQ ID NO: 1670 - DNA, 20 bp, Artificial Sequence
  Description of Artificial Sequence: Synthetic primer
taagagttcagatgtcttag

SEQ ID NO: 1671 - DNA, 20 bp, Artificial Sequence
  Description of Artificial Sequence: Synthetic primer
ttgtagagacaaggagcgtg

SEQ ID NO: 1672 - DNA, 20 bp, Artificial Sequence
  Description of Artificial Sequence: Synthetic primer
acaaaaggactgcagaagcc

SEQ ID NO: 1673 - DNA, 20 bp, Artificial Sequence
  Description of Artificial Sequence: Synthetic primer
atcttacaatggaggagctg

SEQ ID NO: 1674 - DNA, 20 bp, Artificial Sequence
  Description of Artificial Sequence: Synthetic primer
tatgatgctgtgagaagtgg

SEQ ID NO: 1675 - DNA, 20 bp, Artificial Sequence
  Description of Artificial Sequence: Synthetic primer
tatgatgctgtgagaagtgg

SEQ ID NO: 1676 - DNA, 20 bp, Artificial Sequence
  Description of Artificial Sequence: Synthetic primer
agaccacttctcacagcatc

SEQ ID NO: 1677 - DNA, 20 bp, Artificial Sequence
  Description of Artificial Sequence: Synthetic primer
ggagaggagaaagacacaag

SEQ ID NO: 1678 - DNA, 20 bp, Artificial Sequence
  Description of Artificial Sequence: Synthetic primer
acccatgggccaccttctga

SEQ ID NO: 1679 - DNA, 20 bp, Artificial Sequence
  Description of Artificial Sequence: Synthetic primer
atatgtccagggagataagc

SEQ ID NO: 1680 - DNA, 20 bp, Artificial Sequence
  Description of Artificial Sequence: Synthetic primer
ggcaaggagaaccctatttc

SEQ ID NO: 1681 - DNA, 20 bp, Artificial Sequence
  Description of Artificial Sequence: Synthetic primer
atgaaatagggttctccttg

SEQ ID NO: 1682 - DNA, 20 bp, Artificial Sequence
  Description of Artificial Sequence: Synthetic primer
tgaagggagtgatatatgct

SEQ ID NO: 1683 - DNA, 20 bp, Artificial Sequence
  Description of Artificial Sequence: Synthetic primer
tgacacaatttggcaggtgg

SEQ ID NO: 1684 - DNA, 20 bp, Artificial Sequence
  Description of Artificial Sequence: Synthetic primer
attgtgtcaatgatgcaatg

SEQ ID NO: 1685 - DNA, 20 bp, Artificial Sequence
  Description of Artificial Sequence: Synthetic primer
gacctgagtttcctcattta

SEQ ID NO: 1686 - DNA, 19 bp, Artificial Sequence
  Description of Artificial Sequence: Synthetic primer
tgggagacctgggctccat

SEQ ID NO: 1687 - DNA, 20 bp, Artificial Sequence
  Description of Artificial Sequence: Synthetic primer
ttaccaaatagggaagcagg

SEQ ID NO: 1688 - DNA, 20 bp, Artificial Sequence
  Description of Artificial Sequence: Synthetic primer
atgcaggtactgttgctttt

SEQ ID NO: 1689 - DNA, 20 bp, Artificial Sequence
  Description of Artificial Sequence: Synthetic primer
atgcaggtactgttgctttt

SEQ ID NO: 1690 - DNA, 20 bp, Artificial Sequence
  Description of Artificial Sequence: Synthetic primer
ggccagtgtgaaggaaaaac

SEQ ID NO: 1691 - DNA, 20 bp, Artificial Sequence
  Description of Artificial Sequence: Synthetic primer
ctcctaattccttgtttaag

SEQ ID NO: 1692 - DNA, 20 bp, Artificial Sequence
  Description of Artificial Sequence: Synthetic primer
cctagaacatgtccaaaggc

SEQ ID NO: 1693 - DNA, 20 bp, Artificial Sequence
  Description of Artificial Sequence: Synthetic primer
tgccaagagaagcaccaaag

SEQ ID NO: 1694 - DNA, 20 bp, Artificial Sequence
  Description of Artificial Sequence: Synthetic primer
gagatggtaactgaagctcc

SEQ ID NO: 1695 - DNA, 20 bp, Artificial Sequence
  Description of Artificial Sequence: Synthetic primer
tccatgctctgcctggcaat

SEQ ID NO: 1696 - DNA, 20 bp, Artificial Sequence
  Description of Artificial Sequence: Synthetic primer
gcatcccagaaaaagcactc

SEQ ID NO: 1697 - DNA, 20 bp, Artificial Sequence
  Description of Artificial Sequence: Synthetic primer
aacagagcagagtgcgtttg

SEQ ID NO: 1698 - DNA, 20 bp, Artificial Sequence
  Description of Artificial Sequence: Synthetic primer
aacagagcagagtgcgtttg

SEQ ID NO: 1699 - DNA, 20 bp, Artificial Sequence
  Description of Artificial Sequence: Synthetic primer
gagcaagaactatccatccc

SEQ ID NO: 1700 - DNA, 20 bp, Artificial Sequence
  Description of Artificial Sequence: Synthetic primer
ctgtctcatccacaccactc

SEQ ID NO: 1701 - DNA, 20 bp, Artificial Sequence
  Description of Artificial Sequence: Synthetic primer
agtggtgtggatgagacagg

SEQ ID NO: 1702 - DNA, 20 bp, Artificial Sequence
  Description of Artificial Sequence: Synthetic primer
agaaagctcctctcacatgg

SEQ ID NO: 1703 - DNA, 20 bp, Artificial Sequence
  Description of Artificial Sequence: Synthetic primer
tcaacaggtatgtccgacca

SEQ ID NO: 1704 - DNA, 20 bp, Artificial Sequence
  Description of Artificial Sequence: Synthetic primer
atgttcactctgggtccttc

SEQ ID NO: 1705 - DNA, 20 bp, Artificial Sequence
  Description of Artificial Sequence: Synthetic primer
cagaaggacccagagtgaac

SEQ ID NO: 1706 - DNA, 20 bp, Artificial Sequence
  Description of Artificial Sequence: Synthetic primer
cgctggcagtcttctaactc

SEQ ID NO: 1707 - DNA, 20 bp, Artificial Sequence
  Description of Artificial Sequence: Synthetic primer
gcctcaagcaaggttgacac

SEQ ID NO: 1708 - DNA, 19 bp, Artificial Sequence
  Description of Artificial Sequence: Synthetic primer
ggggccttgagtgatagga

SEQ ID NO: 1709 - DNA, 20 bp, Artificial Sequence
  Description of Artificial Sequence: Synthetic primer
actatctacccatcacagac

SEQ ID NO: 1710 - DNA, 20 bp, Artificial Sequence
  Description of Artificial Sequence: Synthetic primer
gcacaaatggatgcatacag

SEQ ID NO: 1711 - DNA, 20 bp, Artificial Sequence
  Description of Artificial Sequence: Synthetic primer
gcctacaggtatgcgtgatt

SEQ ID NO: 1712 - DNA, 20 bp, Artificial Sequence
  Description of Artificial Sequence: Synthetic primer
gcctacaggtatgcgtgatt

SEQ ID NO: 1713 - DNA, 20 bp, Artificial Sequence
  Description of Artificial Sequence: Synthetic primer
cagatggtacacattcccag

SEQ ID NO: 1714 - DNA, 20 bp, Artificial Sequence
  Description of Artificial Sequence: Synthetic primer
gcctacaggtatgcgtgatt

SEQ ID NO: 1715 - DNA, 20 bp, Artificial Sequence
  Description of Artificial Sequence: Synthetic primer
gcctacaggtatgcgtgatt

SEQ ID NO: 1716 - DNA, 20 bp, Artificial Sequence
  Description of Artificial Sequence: Synthetic primer
tacatccccaccccacagtt

SEQ ID NO: 1717 - DNA, 20 bp, Artificial Sequence
  Description of Artificial Sequence: Synthetic primer
tgaggggccagcccttagtg

SEQ ID NO: 1718 - DNA, 20 bp, Artificial Sequence
  Description of Artificial Sequence: Synthetic primer
aagtgaggaggagaaggtgg

SEQ ID NO: 1719 - DNA, 20 bp, Artificial Sequence
  Description of Artificial Sequence: Synthetic primer
tgatctcagggagaattgtg

SEQ ID NO: 1720 - DNA, 20 bp, Artificial Sequence
  Description of Artificial Sequence: Synthetic primer
agctaactatcaggttgttg

SEQ ID NO: 1721 - DNA, 20 bp, Artificial Sequence
  Description of Artificial Sequence: Synthetic primer
agtgcagtggctcttcacag

SEQ ID NO: 1722 - DNA, 20 bp, Artificial Sequence
  Description of Artificial Sequence: Synthetic primer
tggcctaggctccttccact

SEQ ID NO: 1723 - DNA, 20 bp, Artificial Sequence
  Description of Artificial Sequence: Synthetic primer
tcagggaaaggaagaaaagg

SEQ ID NO: 1724 - DNA, 19 bp, Artificial Sequence
  Description of Artificial Sequence: Synthetic primer
cagcttcaggctggcgccc

SEQ ID NO: 1725 - DNA, 20 bp, Artificial Sequence
  Description of Artificial Sequence: Synthetic primer
gaaaaactccttccctgctg

SEQ ID NO: 1726 - DNA, 20 bp, Artificial Sequence
  Description of Artificial Sequence: Synthetic primer
gagcctcagctggatgagag

SEQ ID NO: 1727 - DNA, 20 bp, Artificial Sequence
  Description of Artificial Sequence: Synthetic primer
cacaccgtgcaagtggcttc

SEQ ID NO: 1728 - DNA, 20 bp, Artificial Sequence
  Description of Artificial Sequence: Synthetic primer
cgtgcaagtggcttctagtt

SEQ ID NO: 1729 - DNA, 20 bp, Artificial Sequence
  Description of Artificial Sequence: Synthetic primer
ttatctgccagcattgcctg

SEQ ID NO: 1730 - DNA, 20 bp, Artificial Sequence
  Description of Artificial Sequence: Synthetic primer
tattccggctgcgacaaaac

SEQ ID NO: 1731 - DNA, 20 bp, Artificial Sequence
  Description of Artificial Sequence: Synthetic primer
gcttaagagattggctctgg

SEQ ID NO: 1732 - DNA, 19 bp, Artificial Sequence
  Description of Artificial Sequence: Synthetic primer
agagccaggccctggacac

SEQ ID NO: 1733 - DNA, 20 bp, Artificial Sequence
  Description of Artificial Sequence: Synthetic primer
tcctctctggaaggtgtctg

SEQ ID NO: 1734 - DNA, 20 bp, Artificial Sequence
  Description of Artificial Sequence: Synthetic primer
atggtgtggcaccatggctg

SEQ ID NO: 1735 - DNA, 20 bp, Artificial Sequence
  Description of Artificial Sequence: Synthetic primer
tctggctttggcctgcaaca

SEQ ID NO: 1736 - DNA, 19 bp, Artificial Sequence
  Description of Artificial Sequence: Synthetic primer
cctggatccagggcctaac

SEQ ID NO: 1737 - DNA, 19 bp, Artificial Sequence
  Description of Artificial Sequence: Synthetic primer
cctggatccagggcctaac

SEQ ID NO: 1738 - DNA, 20 bp, Artificial Sequence
  Description of Artificial Sequence: Synthetic primer
aaatgcccaggtaagagtga

SEQ ID NO: 1739 - DNA, 20 bp, Artificial Sequence
  Description of Artificial Sequence: Synthetic primer
tcgtgagcgcatgaatgagg

SEQ ID NO: 1740 - DNA, 20 bp, Artificial Sequence
  Description of Artificial Sequence: Synthetic primer
atctgtgaccccagcaggag

SEQ ID NO: 1741 - DNA, 20 bp, Artificial Sequence
  Description of Artificial Sequence: Synthetic primer
tggttgatggctttcaacgt

SEQ ID NO: 1742 - DNA, 20 bp, Artificial Sequence
  Description of Artificial Sequence: Synthetic primer
atgtgaaactacaggctaag

SEQ ID NO: 1743 - DNA, 20 bp, Artificial Sequence
  Description of Artificial Sequence: Synthetic primer
ctttatcttcctactccacc

SEQ ID NO: 1744 - DNA, 20 bp, Artificial Sequence
  Description of Artificial Sequence: Synthetic primer
cctctccagttcagttttgc

SEQ ID NO: 1745 - DNA, 20 bp, Artificial Sequence
  Description of Artificial Sequence: Synthetic primer
gggttacccttcctaagctg

SEQ ID NO: 1746 - DNA, 20 bp, Artificial Sequence
  Description of Artificial Sequence: Synthetic primer
tggcccagcccttacgttct

SEQ ID NO: 1747 - DNA, 20 bp, Artificial Sequence
  Description of Artificial Sequence: Synthetic primer
gggcatggtcttttgcctag

SEQ ID NO: 1748 - DNA, 20 bp, Artificial Sequence
  Description of Artificial Sequence: Synthetic primer
aacttctcctctgggccata

SEQ ID NO: 1749 - DNA, 20 bp, Artificial Sequence
  Description of Artificial Sequence: Synthetic primer
aacttctcctctgggccata

SEQ ID NO: 1750 - DNA, 20 bp, Artificial Sequence
  Description of Artificial Sequence: Synthetic primer
aacttctcctctgggccata

SEQ ID NO: 1751 - DNA, 20 bp, Artificial Sequence
  Description of Artificial Sequence: Synthetic primer
ccactccccaaggttcaaag

SEQ ID NO: 1752 - DNA, 20 bp, Artificial Sequence
  Description of Artificial Sequence: Synthetic primer
aagaccaggcatgccctgtg

SEQ ID NO: 1753 - DNA, 20 bp, Artificial Sequence
  Description of Artificial Sequence: Synthetic primer
caaagaggtgtgtgtgttcc

SEQ ID NO: 1754 - DNA, 20 bp, Artificial Sequence
  Description of Artificial Sequence: Synthetic primer
ttttggtgaaggctcctctg

SEQ ID NO: 1755 - DNA, 20 bp, Artificial Sequence
  Description of Artificial Sequence: Synthetic primer
agcatcttcaccttcttctc

SEQ ID NO: 1756 - DNA, 20 bp, Artificial Sequence
  Description of Artificial Sequence: Synthetic primer
tgggaggaatagggagacag

SEQ ID NO: 1757 - DNA, 20 bp, Artificial Sequence
  Description of Artificial Sequence: Synthetic primer
ttagtgaccattggtggatc

SEQ ID NO: 1758 - DNA, 21 bp, Artificial Sequence
  Description of Artificial Sequence: Synthetic primer
cctgggttctataagatgttg

SEQ ID NO: 1759 - DNA, 20 bp, Artificial Sequence
  Description of Artificial Sequence: Synthetic primer
aggaagagcatctggctcgg

SEQ ID NO: 1760 - DNA, 20 bp, Artificial Sequence
  Description of Artificial Sequence: Synthetic primer
tagaatggaatactagtccc

SEQ ID NO: 1761 - DNA, 20 bp, Artificial Sequence
  Description of Artificial Sequence: Synthetic primer
tgttggctagtgtctgtgtg

SEQ ID NO: 1762 - DNA, 20 bp, Artificial Sequence
  Description of Artificial Sequence: Synthetic primer
gtgttgagtcgtttgctcag

SEQ ID NO: 1763 - DNA, 20 bp, Artificial Sequence
  Description of Artificial Sequence: Synthetic primer
gtggtagaaggttctagctg

SEQ ID NO: 1764 - DNA, 20 bp, Artificial Sequence
  Description of Artificial Sequence: Synthetic primer
atggaagggacaggcaagaa

SEQ ID NO: 1765 - DNA, 20 bp, Artificial Sequence
  Description of Artificial Sequence: Synthetic primer
atcccagggaggaaaatttg

SEQ ID NO: 1766 - DNA, 20 bp, Artificial Sequence
  Description of Artificial Sequence: Synthetic primer
caactcatgcgatagtgagc

SEQ ID NO: 1767 - DNA, 20 bp, Artificial Sequence
  Description of Artificial Sequence: Synthetic primer
ttgagtagctgggactacag

SEQ ID NO: 1768 - DNA, 20 bp, Artificial Sequence
  Description of Artificial Sequence: Synthetic primer
ccagcttcagtttctgaatc

SEQ ID NO: 1769 - DNA, 21 bp, Artificial Sequence
  Description of Artificial Sequence: Synthetic primer
atcctgtgagtggccacaatt

SEQ ID NO: 1770 - DNA, 20 bp, Artificial Sequence
  Description of Artificial Sequence: Synthetic primer
actcacaggatggagagcaa

SEQ ID NO: 1771 - DNA, 20 bp, Artificial Sequence
  Description of Artificial Sequence: Synthetic primer
aacccagaaatcagtgctgc

SEQ ID NO: 1772 - DNA, 21 bp, Artificial Sequence
  Description of Artificial Sequence: Synthetic primer
taagttcaggcccctcagaga

SEQ ID NO: 1773 - DNA, 20 bp, Artificial Sequence
  Description of Artificial Sequence: Synthetic primer
ccaagttggataagggcctg

SEQ ID NO: 1774 - DNA, 20 bp, Artificial Sequence
  Description of Artificial Sequence: Synthetic primer
ggacttctctgaggagatgg

SEQ ID NO: 1775 - DNA, 20 bp, Artificial Sequence
  Description of Artificial Sequence: Synthetic primer
taattaattcctgagctccc

SEQ ID NO: 1776 - DNA, 20 bp, Artificial Sequence
  Description of Artificial Sequence: Synthetic primer
agtgtgtatgaagtgccacg

SEQ ID NO: 1777 - DNA, 20 bp, Artificial Sequence
  Description of Artificial Sequence: Synthetic primer
aggaaataaacaaggagggg

SEQ ID NO: 1778 - DNA, 20 bp, Artificial Sequence
  Description of Artificial Sequence: Synthetic primer
aagcctccgttttgccatct

SEQ ID NO: 1779 - DNA, 20 bp, Artificial Sequence
  Description of Artificial Sequence: Synthetic primer
gctttttgttcagggtgatg

SEQ ID NO: 1780 - DNA, 20 bp, Artificial Sequence
  Description of Artificial Sequence: Synthetic primer
aatccactggtaccatgggg

SEQ ID NO: 1781 - DNA, 20 bp, Artificial Sequence
  Description of Artificial Sequence: Synthetic primer
tactcaggccttggtgaaga

SEQ ID NO: 1782 - DNA, 19 bp, Artificial Sequence
  Description of Artificial Sequence: Synthetic primer
atcaggttgccgtcctcac

SEQ ID NO: 1783 - DNA, 20 bp, Artificial Sequence
  Description of Artificial Sequence: Synthetic primer
gatctctgaggctccctgta

SEQ ID NO: 1784 - DNA, 20 bp, Artificial Sequence
  Description of Artificial Sequence: Synthetic primer
atttcctcttgttagaatgc

SEQ ID NO: 1785 - DNA, 20 bp, Artificial Sequence
  Description of Artificial Sequence: Synthetic primer
catgctagttagccagacag

SEQ ID NO: 1786 - DNA, 20 bp, Artificial Sequence
  Description of Artificial Sequence: Synthetic primer
tctaccttctccattctccc

SEQ ID NO: 1787 - DNA, 21 bp, Artificial Sequence
  Description of Artificial Sequence: Synthetic primer
aacctccttcctgtgtgctcc

SEQ ID NO: 1788 - DNA, 20 bp, Artificial Sequence
  Description of Artificial Sequence: Synthetic primer
tttgggtctgtgggcttcca

SEQ ID NO: 1789 - DNA, 20 bp, Artificial Sequence
  Description of Artificial Sequence: Synthetic primer
acagaacctgttcagatccc

SEQ ID NO: 1790 - DNA, 20 bp, Artificial Sequence
  Description of Artificial Sequence: Synthetic primer
ttttgagtacacagggaccg

SEQ ID NO: 1791 - DNA, 20 bp, Artificial Sequence
  Description of Artificial Sequence: Synthetic primer
taatgtgaggtcatatcccc

SEQ ID NO: 1792 - DNA, 21 bp, Artificial Sequence
  Description of Artificial Sequence: Synthetic primer
aacacagatggcagctgttac

SEQ ID NO: 1793 - DNA, 20 bp, Artificial Sequence
  Description of Artificial Sequence: Synthetic primer
cattacccgtgtaacctcag

SEQ ID NO: 1794 - DNA, 20 bp, Artificial Sequence
  Description of Artificial Sequence: Synthetic primer
taaaacttacactggatgga

SEQ ID NO: 1795 - DNA, 20 bp, Artificial Sequence
  Description of Artificial Sequence: Synthetic primer
agggagggccaagtctcagt

SEQ ID NO: 1796 - DNA, 20 bp, Artificial Sequence
  Description of Artificial Sequence: Synthetic primer
atatgccagctccaagtgac

SEQ ID NO: 1797 - DNA, 20 bp, Artificial Sequence
  Description of Artificial Sequence: Synthetic primer
atccttcacagtgaactccc

SEQ ID NO: 1798 - DNA, 19 bp, Artificial Sequence
  Description of Artificial Sequence: Synthetic primer
acggggagaagcagcacac

SEQ ID NO: 1799 - DNA, 20 bp, Artificial Sequence
  Description of Artificial Sequence: Synthetic primer
gctggaaggcccagttaatg

SEQ ID NO: 1800 - DNA, 20 bp, Artificial Sequence
  Description of Artificial Sequence: Synthetic primer
atatgcctctgcccaagtca

SEQ ID NO: 1801 - DNA, 20 bp, Artificial Sequence
  Description of Artificial Sequence: Synthetic primer
gtccattcactcatccattc

SEQ ID NO: 1802 - DNA, 20 bp, Artificial Sequence
  Description of Artificial Sequence: Synthetic primer
ttcactggggacctcagaag

SEQ ID NO: 1803 - DNA, 20 bp, Artificial Sequence
  Description of Artificial Sequence: Synthetic primer
ctgactttgcatcttggctc

SEQ ID NO: 1804 - DNA, 20 bp, Artificial Sequence
  Description of Artificial Sequence: Synthetic primer
attttacaagggagaaactg

SEQ ID NO: 1805 - DNA, 20 bp, Artificial Sequence
  Description of Artificial Sequence: Synthetic primer
atggtgctgccctacaaaga

SEQ ID NO: 1806 - DNA, 20 bp, Artificial Sequence
  Description of Artificial Sequence: Synthetic primer
agtgtgggtagctgtccttt

SEQ ID NO: 1807 - DNA, 20 bp, Artificial Sequence
  Description of Artificial Sequence: Synthetic primer
ggtgacttgtttttaacctg

SEQ ID NO: 1808 - DNA, 21 bp, Artificial Sequence
  Description of Artificial Sequence: Synthetic primer
aacagtgtgggggctgcactt

SEQ ID NO: 1809 - DNA, 20 bp, Artificial Sequence
  Description of Artificial Sequence: Synthetic primer
tggtggacaagaaccaggac

SEQ ID NO: 1810 - DNA, 20 bp, Artificial Sequence
  Description of Artificial Sequence: Synthetic primer
agcagtgtcctggttcttgt

SEQ ID NO: 1811 - DNA, 20 bp, Artificial Sequence
  Description of Artificial Sequence: Synthetic primer
gggagaaagaaaggcagtgg

SEQ ID NO: 1812 - DNA, 20 bp, Artificial Sequence
  Description of Artificial Sequence: Synthetic primer
tgtagtttgtggaaccaggc

SEQ ID NO: 1813 - DNA, 20 bp, Artificial Sequence
  Description of Artificial Sequence: Synthetic primer
ttccacccaaggatgaaagg

SEQ ID NO: 1814 - DNA, 20 bp, Artificial Sequence
  Description of Artificial Sequence: Synthetic primer
ctacatggatgaggaagcag

SEQ ID NO: 1815 - DNA, 20 bp, Artificial Sequence
  Description of Artificial Sequence: Synthetic primer
aggtgtgagttacctaaggg

SEQ ID NO: 1816 - DNA, 20 bp, Artificial Sequence
  Description of Artificial Sequence: Synthetic primer
accccattctttttgatggc

SEQ ID NO: 1817 - DNA, 20 bp, Artificial Sequence
  Description of Artificial Sequence: Synthetic primer
tgttatttaggctgagcgtg

SEQ ID NO: 1818 - DNA, 20 bp, Artificial Sequence
  Description of Artificial Sequence: Synthetic primer
gctcactcatctggtttaag

SEQ ID NO: 1819 - DNA, 20 bp, Artificial Sequence
  Description of Artificial Sequence: Synthetic primer
aaacagccagctgctgctca

SEQ ID NO: 1820 - DNA, 21 bp, Artificial Sequence
  Description of Artificial Sequence: Synthetic primer
aaagaccttggcggccaccat

SEQ ID NO: 1821 - DNA, 20 bp, Artificial Sequence
  Description of Artificial Sequence: Synthetic primer
agacttggaagagaatgccc

SEQ ID NO: 1822 - DNA, 19 bp, Artificial Sequence
  Description of Artificial Sequence: Synthetic primer
tgagacagggcctcactct

SEQ ID NO: 1823 - DNA, 22 bp, Artificial Sequence
  Description of Artificial Sequence: Synthetic primer
gtctgaggatcagtaataatac

SEQ ID NO: 1824 - DNA, 19 bp, Artificial Sequence
  Description of Artificial Sequence: Synthetic primer
cttaattgcaatgcctctt

SEQ ID NO: 1825 - DNA, 17 bp, Artificial Sequence
  Description of Artificial Sequence: Synthetic primer
cttgttccctacctagc

SEQ ID NO: 1826 - DNA, 17 bp, Artificial Sequence
  Description of Artificial Sequence: Synthetic primer
ctgaccagggtaacaac

SEQ ID NO: 1827 - DNA, 17 bp, Artificial Sequence
  Description of Artificial Sequence: Synthetic primer
tctccaatcaccgttgt

SEQ ID NO: 1828 - DNA, 20 bp, Artificial Sequence
  Description of Artificial Sequence: Synthetic primer
cctacaagaaatatcaaggc

SEQ ID NO: 1829 - DNA, 18 bp, Artificial Sequence
  Description of Artificial Sequence: Synthetic primer
gagcattacagttgtcac

SEQ ID NO: 1830 - DNA, 20 bp, Artificial Sequence
  Description of Artificial Sequence: Synthetic primer
ttgccactaaataaatccaa

SEQ ID NO: 1831 - DNA, 21 bp, Artificial Sequence
  Description of Artificial Sequence: Synthetic primer
cattcactatgctcttttttt

SEQ ID NO: 1832 - DNA, 17 bp, Artificial Sequence
  Description of Artificial Sequence: Synthetic primer
attccctgctgaaggtt

SEQ ID NO: 1833 - DNA, 17 bp, Artificial Sequence
  Description of Artificial Sequence: Synthetic primer
aatatgggagagccttc

SEQ ID NO: 1834 - DNA, 19 bp, Artificial Sequence
  Description of Artificial Sequence: Synthetic primer
aatacacacaggagagaaa

SEQ ID NO: 1835 - DNA, 18 bp, Artificial Sequence
  Description of Artificial Sequence: Synthetic primer
gagagctttcagtgaagt

SEQ ID NO: 1836 - DNA, 17 bp, Artificial Sequence
  Description of Artificial Sequence: Synthetic primer
gtgggttgtccacatat

SEQ ID NO: 1837 - DNA, 19 bp, Artificial Sequence
  Description of Artificial Sequence: Synthetic primer
caagactcactgcaattta

SEQ ID NO: 1838 - DNA, 18 bp, Artificial Sequence
  Description of Artificial Sequence: Synthetic primer
gggcttcaacatatgaat

SEQ ID NO: 1839 - DNA, 17 bp, Artificial Sequence
  Description of Artificial Sequence: Synthetic primer
gaagatgaaggcctgag

SEQ ID NO: 1840 - DNA, 17 bp, Artificial Sequence
  Description of Artificial Sequence: Synthetic primer
cttcaggaaaatccggc

SEQ ID NO: 1841 - DNA, 17 bp, Artificial Sequence
  Description of Artificial Sequence: Synthetic primer
aaatacagtcagccccc

SEQ ID NO: 1842 - DNA, 21 bp, Artificial Sequence
  Description of Artificial Sequence: Synthetic primer
cttcatttcaggtattctact

SEQ ID NO: 1843 - DNA, 17 bp, Artificial Sequence
  Description of Artificial Sequence: Synthetic primer
tcagaagaggagagcac

SEQ ID NO: 1844 - DNA, 17 bp, Artificial Sequence
  Description of Artificial Sequence: Synthetic primer
ccttccaaaatttccct

SEQ ID NO: 1845 - DNA, 17 bp, Artificial Sequence
  Description of Artificial Sequence: Synthetic primer
gggaaattttggaaggt

SEQ ID NO: 1846 - DNA, 19 bp, Artificial Sequence
  Description of Artificial Sequence: Synthetic primer
gccaagtatcctgtatcaa

SEQ ID NO: 1847 - DNA, 17 bp, Artificial Sequence
  Description of Artificial Sequence: Synthetic primer
agggcaacaataaggga

SEQ ID NO: 1848 - DNA, 17 bp, Artificial Sequence
  Description of Artificial Sequence: Synthetic primer
aaggagcagaagcatga

SEQ ID NO: 1849 - DNA, 17 bp, Artificial Sequence
  Description of Artificial Sequence: Synthetic primer
ctgagcagccctagtga

SEQ ID NO: 1850 - DNA, 17 bp, Artificial Sequence
  Description of Artificial Sequence: Synthetic primer
ctcctgacctcgtgatc

SEQ ID NO: 1851 - DNA, 18 bp, Artificial Sequence
  Description of Artificial Sequence: Synthetic primer
tgggtgaaaaaattggta

SEQ ID NO: 1852 - DNA, 19 bp, Artificial Sequence
  Description of Artificial Sequence: Synthetic primer
ctgctgatgatgtaggaat

SEQ ID NO: 1853 - DNA, 17 bp, Artificial Sequence
  Description of Artificial Sequence: Synthetic primer
gaagctgagaagtcccg

SEQ ID NO: 1854 - DNA, 24 bp, Artificial Sequence
  Description of Artificial Sequence: Synthetic primer
ccaattcattataggaaatttttt

SEQ ID NO: 1855 - DNA, 22 bp, Artificial Sequence
  Description of Artificial Sequence: Synthetic primer
ggtttatctcagcattgtttat

SEQ ID NO: 1856 - DNA, 20 bp, Artificial Sequence
  Description of Artificial Sequence: Synthetic primer
ctagtctccttgttctctta

SEQ ID NO: 1857 - DNA, 17 bp, Artificial Sequence
  Description of Artificial Sequence: Synthetic primer
tcctttttccaccttgc

SEQ ID NO: 1858 - DNA, 21 bp, Artificial Sequence
  Description of Artificial Sequence: Synthetic primer
gtaaacatccaaaagcatttc

SEQ ID NO: 1859 - DNA, 17 bp, Artificial Sequence
  Description of Artificial Sequence: Synthetic primer
acatcctgagatgaagg

SEQ ID NO: 1860 - DNA, 17 bp, Artificial Sequence
  Description of Artificial Sequence: Synthetic primer
caggcagcagcagcaca

SEQ ID NO: 1861 - DNA, 21 bp, Artificial Sequence
  Description of Artificial Sequence: Synthetic primer
accttctctgagggtattcta

SEQ ID NO: 1862 - DNA, 20 bp, Artificial Sequence
  Description of Artificial Sequence: Synthetic primer
cccttagaggtcatctggtc

SEQ ID NO: 1863 - DNA, 18 bp, Artificial Sequence
  Description of Artificial Sequence: Synthetic primer
ccatacaaaatccccttg

SEQ ID NO: 1864 - DNA, 17 bp, Artificial Sequence
  Description of Artificial Sequence: Synthetic primer
tgactgggacccaggct

SEQ ID NO: 1865 - DNA, 17 bp, Artificial Sequence
  Description of Artificial Sequence: Synthetic primer
ggcccagcagccagaag

SEQ ID NO: 1866 - DNA, 19 bp, Artificial Sequence
  Description of Artificial Sequence: Synthetic primer
gaaaagaaaggctaagtga

SEQ ID NO: 1867 - DNA, 17 bp, Artificial Sequence
  Description of Artificial Sequence: Synthetic primer
actgaggcccagagagg

SEQ ID NO: 1868 - DNA, 17 bp, Artificial Sequence
  Description of Artificial Sequence: Synthetic primer
gtctgcgccaccttccc

SEQ ID NO: 1869 - DNA, 17 bp, Artificial Sequence
  Description of Artificial Sequence: Synthetic primer
ggagactcaatgccagg

SEQ ID NO: 1870 - DNA, 17 bp, Artificial Sequence
  Description of Artificial Sequence: Synthetic primer
ctgtgctggtgctggtg

SEQ ID NO: 1871 - DNA, 17 bp, Artificial Sequence
  Description of Artificial Sequence: Synthetic primer
atctcagttgtccacct

SEQ ID NO: 1872 - DNA, 17 bp, Artificial Sequence
  Description of Artificial Sequence: Synthetic primer
tacccctggattgctac

SEQ ID NO: 1873 - DNA, 17 bp, Artificial Sequence
  Description of Artificial Sequence: Synthetic primer
aggcacctagggtcaca

SEQ ID NO: 1874 - DNA, 18 bp, Artificial Sequence
  Description of Artificial Sequence: Synthetic primer
cactggagatcactaatc

SEQ ID NO: 1875 - DNA, 17 bp, Artificial Sequence
  Description of Artificial Sequence: Synthetic primer
cctcagtttcctcagct

SEQ ID NO: 1876 - DNA, 17 bp, Artificial Sequence
  Description of Artificial Sequence: Synthetic primer
acacagggagcaaattt

SEQ ID NO: 1877 - DNA, 17 bp, Artificial Sequence
  Description of Artificial Sequence: Synthetic primer
ccaaaccacctggctta

SEQ ID NO: 1878 - DNA, 18 bp, Artificial Sequence
  Description of Artificial Sequence: Synthetic primer
gtctttgggtcttcattt

SEQ ID NO: 1879 - DNA, 17 bp, Artificial Sequence
  Description of Artificial Sequence: Synthetic primer
tcctccccatcataagg

SEQ ID NO: 1880 - DNA, 17 bp, Artificial Sequence
  Description of Artificial Sequence: Synthetic primer
ttcctccccatcataag

SEQ ID NO: 1881 - DNA, 17 bp, Artificial Sequence
  Description of Artificial Sequence: Synthetic primer
ctctgtccctacagtcc

SEQ ID NO: 1882 - DNA, 21 bp, Artificial Sequence
  Description of Artificial Sequence: Synthetic primer
gcatttcttattcctatcgag

SEQ ID NO: 1883 - DNA, 17 bp, Artificial Sequence
  Description of Artificial Sequence: Synthetic primer
gctccctagaactgatg

SEQ ID NO: 1884 - DNA, 18 bp, Artificial Sequence
  Description of Artificial Sequence: Synthetic primer
gagacttccatcagttct

SEQ ID NO: 1885 - DNA, 17 bp, Artificial Sequence
  Description of Artificial Sequence: Synthetic primer
ccattacagccagggca

SEQ ID NO: 1886 - DNA, 17 bp, Artificial Sequence
  Description of Artificial Sequence: Synthetic primer
ctttggagccaaaagag

SEQ ID NO: 1887 - DNA, 17 bp, Artificial Sequence
  Description of Artificial Sequence: Synthetic primer
gcggccaagccgagacc

SEQ ID NO: 1888 - DNA, 17 bp, Artificial Sequence
  Description of Artificial Sequence: Synthetic primer
gattggctgcaagggtc

SEQ ID NO: 1889 - DNA, 17 bp, Artificial Sequence
  Description of Artificial Sequence: Synthetic primer
tcctgcctgctttccct

SEQ ID NO: 1890 - DNA, 17 bp, Artificial Sequence
  Description of Artificial Sequence: Synthetic primer
gaccctcgaggtggcag

SEQ ID NO: 1891 - DNA, 17 bp, Artificial Sequence
  Description of Artificial Sequence: Synthetic primer
agatgtagcaaggcgac

SEQ ID NO: 1892 - DNA, 18 bp, Artificial Sequence
  Description of Artificial Sequence: Synthetic primer
cagagatctgtgctagaa

SEQ ID NO: 1893 - DNA, 19 bp, Artificial Sequence
  Description of Artificial Sequence: Synthetic primer
tgttctctgaaatttcctc

SEQ ID NO: 1894 - DNA, 17 bp, Artificial Sequence
  Description of Artificial Sequence: Synthetic primer
agcaggtgtgtggccca

SEQ ID NO: 1895 - DNA, 17 bp, Artificial Sequence
  Description of Artificial Sequence: Synthetic primer
tactggggtgggctctg

SEQ ID NO: 1896 - DNA, 17 bp, Artificial Sequence
  Description of Artificial Sequence: Synthetic primer
tgcatgttgggaagttg

SEQ ID NO: 1897 - DNA, 19 bp, Artificial Sequence
  Description of Artificial Sequence: Synthetic primer
cggaatcctagactcataa

SEQ ID NO: 1898 - DNA, 17 bp, Artificial Sequence
  Description of Artificial Sequence: Synthetic primer
atagacaggccagcacc

SEQ ID NO: 1899 - DNA, 18 bp, Artificial Sequence
  Description of Artificial Sequence: Synthetic primer
caaccttcagttttggaa

SEQ ID NO: 1900 - DNA, 17 bp, Artificial Sequence
  Description of Artificial Sequence: Synthetic primer
acgttctccccactagc

SEQ ID NO: 1901 - DNA, 17 bp, Artificial Sequence
  Description of Artificial Sequence: Synthetic primer
atccttccccagagtgc

SEQ ID NO: 1902 - DNA, 20 bp, Artificial Sequence
  Description of Artificial Sequence: Synthetic primer
ctcaccctaaaacttttcta

SEQ ID NO: 1903 - DNA, 17 bp, Artificial Sequence
  Description of Artificial Sequence: Synthetic primer
ctgctcccaagttctta

SEQ ID NO: 1904 - DNA, 17 bp, Artificial Sequence
  Description of Artificial Sequence: Synthetic primer
acatgccccataaccct

SEQ ID NO: 1905 - DNA, 17 bp, Artificial Sequence
  Description of Artificial Sequence: Synthetic primer
tccccagtccaacttca

SEQ ID NO: 1906 - DNA, 17 bp, Artificial Sequence
  Description of Artificial Sequence: Synthetic primer
gcagttactaggatccc

SEQ ID NO: 1907 - DNA, 17 bp, Artificial Sequence
  Description of Artificial Sequence: Synthetic primer
ttgctgtgtctctgatg

SEQ ID NO: 1908 - DNA, 17 bp, Artificial Sequence
  Description of Artificial Sequence: Synthetic primer
catcagagacacagcaa

SEQ ID NO: 1909 - DNA, 17 bp, Artificial Sequence
  Description of Artificial Sequence: Synthetic primer
cagagacacagcaaagc

SEQ ID NO: 1910 - DNA, 18 bp, Artificial Sequence
  Description of Artificial Sequence: Synthetic primer
tctcctctcccgtcttat

SEQ ID NO: 1911 - DNA, 17 bp, Artificial Sequence
  Description of Artificial Sequence: Synthetic primer
tggatgatgggactcag

SEQ ID NO: 1912 - DNA, 19 bp, Artificial Sequence
  Description of Artificial Sequence: Synthetic primer
gaacgaaatctcatgtcaa

SEQ ID NO: 1913 - DNA, 17 bp, Artificial Sequence
  Description of Artificial Sequence: Synthetic primer
agcagattcccacaacc

SEQ ID NO: 1914 - DNA, 17 bp, Artificial Sequence
  Description of Artificial Sequence: Synthetic primer
gacttgctcagggccac

SEQ ID NO: 1915 - DNA, 22 bp, Artificial Sequence
  Description of Artificial Sequence: Synthetic primer
cctaataatgggaacttgtaaa

SEQ ID NO: 1916 - DNA, 17 bp, Artificial Sequence
  Description of Artificial Sequence: Synthetic primer
ggcagctcttctgcact

SEQ ID NO: 1917 - DNA, 18 bp, Artificial Sequence
  Description of Artificial Sequence: Synthetic primer
ttcaaggtttctcctttc

SEQ ID NO: 1918 - DNA, 17 bp, Artificial Sequence
  Description of Artificial Sequence: Synthetic primer
atgagcctactctgccc

SEQ ID NO: 1919 - DNA, 17 bp, Artificial Sequence
  Description of Artificial Sequence: Synthetic primer
catggttgacctggttg

SEQ ID NO: 1920 - DNA, 17 bp, Artificial Sequence
  Description of Artificial Sequence: Synthetic primer
acagggagttaatggca

SEQ ID NO: 1921 - DNA, 17 bp, Artificial Sequence
  Description of Artificial Sequence: Synthetic primer
tgttgcttttccctacc

SEQ ID NO: 1922 - DNA, 19 bp, Artificial Sequence
  Description of Artificial Sequence: Synthetic primer
gctgttgttaccaaatagg

SEQ ID NO: 1923 - DNA, 18 bp, Artificial Sequence
  Description of Artificial Sequence: Synthetic primer
gaagctgttgttaccaaa

SEQ ID NO: 1924 - DNA, 18 bp, Artificial Sequence
  Description of Artificial Sequence: Synthetic primer
gaatcaccatgtccatac

SEQ ID NO: 1925 - DNA, 22 bp, Artificial Sequence
  Description of Artificial Sequence: Synthetic primer
aagcacttaatattaagtaccc

SEQ ID NO: 1926 - DNA, 22 bp, Artificial Sequence
  Description of Artificial Sequence: Synthetic primer
tgtgaagatgattatataagcc

SEQ ID NO: 1927 - DNA, 17 bp, Artificial Sequence
  Description of Artificial Sequence: Synthetic primer
aagctccatcttgctga

SEQ ID NO: 1928 - DNA, 17 bp, Artificial Sequence
  Description of Artificial Sequence: Synthetic primer
tggggctgagggaaaat

SEQ ID NO: 1929 - DNA, 17 bp, Artificial Sequence
  Description of Artificial Sequence: Synthetic primer
tttcacttccgggaatt

SEQ ID NO: 1930 - DNA, 17 bp, Artificial Sequence
  Description of Artificial Sequence: Synthetic primer
tcccggaagtgaaagga

SEQ ID NO: 1931 - DNA, 17 bp, Artificial Sequence
  Description of Artificial Sequence: Synthetic primer
tcagtgtcccctggtct

SEQ ID NO: 1932 - DNA, 17 bp, Artificial Sequence
  Description of Artificial Sequence: Synthetic primer
ctcagtgtcccctggtc

SEQ ID NO: 1933 - DNA, 17 bp, Artificial Sequence
  Description of Artificial Sequence: Synthetic primer
gagggttgtaacctcac

SEQ ID NO: 1934 - DNA, 19 bp, Artificial Sequence
  Description of Artificial Sequence: Synthetic primer
gggcctcagtagttccagc

SEQ ID NO: 1935 - DNA, 18 bp, Artificial Sequence
  Description of Artificial Sequence: Synthetic primer
ccaaagagaaagagcaga

SEQ ID NO: 1936 - DNA, 18 bp, Artificial Sequence
  Description of Artificial Sequence: Synthetic primer
gataaatgtccaccatga

SEQ ID NO: 1937 - DNA, 17 bp, Artificial Sequence
  Description of Artificial Sequence: Synthetic primer
ctggaaattagggacaa

SEQ ID NO: 1938 - DNA, 17 bp, Artificial Sequence
  Description of Artificial Sequence: Synthetic primer
accctgactagggtctc

SEQ ID NO: 1939 - DNA, 17 bp, Artificial Sequence
  Description of Artificial Sequence: Synthetic primer
gctgtggctctagaaga

SEQ ID NO: 1940 - DNA, 17 bp, Artificial Sequence
  Description of Artificial Sequence: Synthetic primer
atagcctggccctgaga

SEQ ID NO: 1941 - DNA, 17 bp, Artificial Sequence
  Description of Artificial Sequence: Synthetic primer
agttctagagcagggat

SEQ ID NO: 1942 - DNA, 18 bp, Artificial Sequence
  Description of Artificial Sequence: Synthetic primer
cacactatctacccatca

SEQ ID NO: 1943 - DNA, 18 bp, Artificial Sequence
  Description of Artificial Sequence: Synthetic primer
gtacacagaactgtatgc

SEQ ID NO: 1944 - DNA, 17 bp, Artificial Sequence
  Description of Artificial Sequence: Synthetic primer
acccacacccacatgcc

SEQ ID NO: 1945 - DNA, 17 bp, Artificial Sequence
  Description of Artificial Sequence: Synthetic primer
cataggtagacacgtgg

SEQ ID NO: 1946 - DNA, 19 bp, Artificial Sequence
  Description of Artificial Sequence: Synthetic primer
aagacacataggtagacac

SEQ ID NO: 1947 - DNA, 18 bp, Artificial Sequence
  Description of Artificial Sequence: Synthetic primer
gcatgggtgtacagccac

SEQ ID NO: 1948 - DNA, 17 bp, Artificial Sequence
  Description of Artificial Sequence: Synthetic primer
ccagaaagacacatagg

SEQ ID NO: 1949 - DNA, 17 bp, Artificial Sequence
  Description of Artificial Sequence: Synthetic primer
cccagaaagacacatag

SEQ ID NO: 1950 - DNA, 17 bp, Artificial Sequence
  Description of Artificial Sequence: Synthetic primer
tgtcacatctgccttgg

SEQ ID NO: 1951 - DNA, 17 bp, Artificial Sequence
  Description of Artificial Sequence: Synthetic primer
cctgcccaggggcctta

SEQ ID NO: 1952 - DNA, 17 bp, Artificial Sequence
  Description of Artificial Sequence: Synthetic primer
tcttttctcatcctccc

SEQ ID NO: 1953 - DNA, 18 bp, Artificial Sequence
  Description of Artificial Sequence: Synthetic primer
aaaggtaattgcggtttt

SEQ ID NO: 1954 - DNA, 17 bp, Artificial Sequence
  Description of Artificial Sequence: Synthetic primer
ggtggcatcttcatgag

SEQ ID NO: 1955 - DNA, 17 bp, Artificial Sequence
  Description of Artificial Sequence: Synthetic primer
tgaggctatagtgtgcc

SEQ ID NO: 1956 - DNA, 17 bp, Artificial Sequence
  Description of Artificial Sequence: Synthetic primer
tccctgagggtagggca

SEQ ID NO: 1957 - DNA, 18 bp, Artificial Sequence
  Description of Artificial Sequence: Synthetic primer
catgttcatttatgcgct

SEQ ID NO: 1958 - DNA, 17 bp, Artificial Sequence
  Description of Artificial Sequence: Synthetic primer
gccatgccagccacgtc

SEQ ID NO: 1959 - DNA, 17 bp, Artificial Sequence
  Description of Artificial Sequence: Synthetic primer
cctggaggcttctgcaa

SEQ ID NO: 1960 - DNA, 18 bp, Artificial Sequence
  Description of Artificial Sequence: Synthetic primer
ctcagttcagggactggt

SEQ ID NO: 1961 - DNA, 17 bp, Artificial Sequence
  Description of Artificial Sequence: Synthetic primer
tgatctcagattgccaa

SEQ ID NO: 1962 - DNA, 18 bp, Artificial Sequence
  Description of Artificial Sequence: Synthetic primer
cagagccagctgatctca

SEQ ID NO: 1963 - DNA, 18 bp, Artificial Sequence
  Description of Artificial Sequence: Synthetic primer
ccaagagcagaaactaac

SEQ ID NO: 1964 - DNA, 20 bp, Artificial Sequence
  Description of Artificial Sequence: Synthetic primer
tgctattgtaatttttgggt

SEQ ID NO: 1965 - DNA, 18 bp, Artificial Sequence
  Description of Artificial Sequence: Synthetic primer
ctgaaggtcatctagcaa

SEQ ID NO: 1966 - DNA, 19 bp, Artificial Sequence
  Description of Artificial Sequence: Synthetic primer
cttctgaactaaacagcac

SEQ ID NO: 1967 - DNA, 17 bp, Artificial Sequence
  Description of Artificial Sequence: Synthetic primer
gctccagggcacacaca

SEQ ID NO: 1968 - DNA, 17 bp, Artificial Sequence
  Description of Artificial Sequence: Synthetic primer
ctacccctacgcctacc

SEQ ID NO: 1969 - DNA, 17 bp, Artificial Sequence
  Description of Artificial Sequence: Synthetic primer
gatgagatgggtgtcct

SEQ ID NO: 1970 - DNA, 17 bp, Artificial Sequence
  Description of Artificial Sequence: Synthetic primer
tcagccggtcagtcctc

SEQ ID NO: 1971 - DNA, 17 bp, Artificial Sequence
  Description of Artificial Sequence: Synthetic primer
atcagccggtcagtcct

SEQ ID NO: 1972 - DNA, 17 bp, Artificial Sequence
  Description of Artificial Sequence: Synthetic primer
tccatgccccctctccc

SEQ ID NO: 1973 - DNA, 17 bp, Artificial Sequence
  Description of Artificial Sequence: Synthetic primer
ctccacttgcttcttca

SEQ ID NO: 1974 - DNA, 17 bp, Artificial Sequence
  Description of Artificial Sequence: Synthetic primer
ttctcctcaggcccaga

SEQ ID NO: 1975 - DNA, 17 bp, Artificial Sequence
  Description of Artificial Sequence: Synthetic primer
acattctgggcttcaag

SEQ ID NO: 1976 - DNA, 17 bp, Artificial Sequence
  Description of Artificial Sequence: Synthetic primer
agagaccctacaaactc

SEQ ID NO: 1977 - DNA, 17 bp, Artificial Sequence
  Description of Artificial Sequence: Synthetic primer
cctaggcatctccctgt

SEQ ID NO: 1978 - DNA, 17 bp, Artificial Sequence
  Description of Artificial Sequence: Synthetic primer
ctagagccgttcccacc

SEQ ID NO: 1979 - DNA, 17 bp, Artificial Sequence
  Description of Artificial Sequence: Synthetic primer
cccatcactggcacccc

SEQ ID NO: 1980 - DNA, 18 bp, Artificial Sequence
  Description of Artificial Sequence: Synthetic primer
gagcattgtgaagtgatg

SEQ ID NO: 1981 - DNA, 17 bp, Artificial Sequence
  Description of Artificial Sequence: Synthetic primer
tgctgacgggaggaact

SEQ ID NO: 1982 - DNA, 17 bp, Artificial Sequence
  Description of Artificial Sequence: Synthetic primer
aaccttggggagtggcc

SEQ ID NO: 1983 - DNA, 17 bp, Artificial Sequence
  Description of Artificial Sequence: Synthetic primer
tgaaccttggggagtgg

SEQ ID NO: 1984 - DNA, 17 bp, Artificial Sequence
  Description of Artificial Sequence: Synthetic primer
gcagctttgaaccttgg

SEQ ID NO: 1985 - DNA, 17 bp, Artificial Sequence
  Description of Artificial Sequence: Synthetic primer
tgcctggtcttcatctc

SEQ ID NO: 1986 - DNA, 17 bp, Artificial Sequence
  Description of Artificial Sequence: Synthetic primer
ggtaatgtggggttcct

SEQ ID NO: 1987 - DNA, 20 bp, Artificial Sequence
  Description of Artificial Sequence: Synthetic primer
ctaagacatggaaactacat

SEQ ID NO: 1988 - DNA, 19 bp, Artificial Sequence
  Description of Artificial Sequence: Synthetic primer
tcaccttcttctcggctgc

SEQ ID NO: 1989 - DNA, 17 bp, Artificial Sequence
  Description of Artificial Sequence: Synthetic primer
ccccaggctagtgtgac

SEQ ID NO: 1990 - DNA, 17 bp, Artificial Sequence
  Description of Artificial Sequence: Synthetic primer
aagacccctcacccaag

SEQ ID NO: 1991 - DNA, 24 bp, Artificial Sequence
  Description of Artificial Sequence: Synthetic primer
cattccattactacagtaataact

SEQ ID NO: 1992 - DNA, 17 bp, Artificial Sequence
  Description of Artificial Sequence: Synthetic primer
cccttcctttacttccc

SEQ ID NO: 1993 - DNA, 17 bp, Artificial Sequence
  Description of Artificial Sequence: Synthetic primer
ccctttaatctccactc

SEQ ID NO: 1994 - DNA, 19 bp, Artificial Sequence
  Description of Artificial Sequence: Synthetic primer
caggacatgcaaatctatt

SEQ ID NO: 1995 - DNA, 17 bp, Artificial Sequence
  Description of Artificial Sequence: Synthetic primer
ctagaggataggggagt

SEQ ID NO: 1996 - DNA, 18 bp, Artificial Sequence
  Description of Artificial Sequence: Synthetic primer
cttgacaaactggaatgt

SEQ ID NO: 1997 - DNA, 17 bp, Artificial Sequence
  Description of Artificial Sequence: Synthetic primer
atggaggtcaggccaag

SEQ ID NO: 1998 - DNA, 17 bp, Artificial Sequence
  Description of Artificial Sequence: Synthetic primer
acatacctgctgctgtc

SEQ ID NO: 1999 - DNA, 17 bp, Artificial Sequence
  Description of Artificial Sequence: Synthetic primer
agcctggccgcccagac

SEQ ID NO: 2000 - DNA, 18 bp, Artificial Sequence
  Description of Artificial Sequence: Synthetic primer
ccctgagttaagaaacct

SEQ ID NO: 2001 - DNA, 17 bp, Artificial Sequence
  Description of Artificial Sequence: Synthetic primer
tacatcaccacccctcc

SEQ ID NO: 2002 - DNA, 18 bp, Artificial Sequence
  Description of Artificial Sequence: Synthetic primer
ggggtttttatagcccta

SEQ ID NO: 2003 - DNA, 17 bp, Artificial Sequence
  Description of Artificial Sequence: Synthetic primer
accagatgactcatcac

SEQ ID NO: 2004 - DNA, 18 bp, Artificial Sequence
  Description of Artificial Sequence: Synthetic primer
gattggagtcttacaaca

SEQ ID NO: 2005 - DNA, 17 bp, Artificial Sequence
  Description of Artificial Sequence: Synthetic primer
ggggctgcaggaggagg

SEQ ID NO: 2006 - DNA, 17 bp, Artificial Sequence
  Description of Artificial Sequence: Synthetic primer
cctcctcctgcagcccc

SEQ ID NO: 2007 - DNA, 17 bp, Artificial Sequence
  Description of Artificial Sequence: Synthetic primer
tctcggcagcctgatcc

SEQ ID NO: 2008 - DNA, 17 bp, Artificial Sequence
  Description of Artificial Sequence: Synthetic primer
ccccagctgacttctac

SEQ ID NO: 2009 - DNA, 17 bp, Artificial Sequence
  Description of Artificial Sequence: Synthetic primer
ctggcagtgaacaagag

SEQ ID NO: 2010 - DNA, 18 bp, Artificial Sequence
  Description of Artificial Sequence: Synthetic primer
tgttgtattcactgttgc

SEQ ID NO: 2011 - DNA, 17 bp, Artificial Sequence
  Description of Artificial Sequence: Synthetic primer
aggggtcctgccaacct

SEQ ID NO: 2012 - DNA, 17 bp, Artificial Sequence
  Description of Artificial Sequence: Synthetic primer
tgggctttagcagcggg

SEQ ID NO: 2013 - DNA, 17 bp, Artificial Sequence
  Description of Artificial Sequence: Synthetic primer
cctcatccctccccaca

SEQ ID NO: 2014 - DNA, 17 bp, Artificial Sequence
  Description of Artificial Sequence: Synthetic primer
gtctgcccacaacacag

SEQ ID NO: 2015 - DNA, 17 bp, Artificial Sequence
  Description of Artificial Sequence: Synthetic primer
gttgccgtcctcacggg

SEQ ID NO: 2016 - DNA, 17 bp, Artificial Sequence
  Description of Artificial Sequence: Synthetic primer
ccctttccctctccagg

SEQ ID NO: 2017 - DNA, 17 bp, Artificial Sequence
  Description of Artificial Sequence: Synthetic primer
atgggaatcacaggaca

SEQ ID NO: 2018 - DNA, 20 bp, Artificial Sequence
  Description of Artificial Sequence: Synthetic primer
gaatggcaatgactataacc

SEQ ID NO: 2019 - DNA, 17 bp, Artificial Sequence
  Description of Artificial Sequence: Synthetic primer
tgtcagtgcccagtgca

SEQ ID NO: 2020 - DNA, 21 bp, Artificial Sequence
  Description of Artificial Sequence: Synthetic primer
ctcgcataacaacaattaaag

SEQ ID NO: 2021 - DNA, 19 bp, Artificial Sequence
  Description of Artificial Sequence: Synthetic primer
cctgtaagacaggtgattt

SEQ ID NO: 2022 - DNA, 17 bp, Artificial Sequence
  Description of Artificial Sequence: Synthetic primer
gggccctgggccttcct

SEQ ID NO: 2023 - DNA, 17 bp, Artificial Sequence
  Description of Artificial Sequence: Synthetic primer
ccccaagtgactccagg

SEQ ID NO: 2024 - DNA, 18 bp, Artificial Sequence
  Description of Artificial Sequence: Synthetic primer
aatcctgctttgtgatct

SEQ ID NO: 2025 - DNA, 17 bp, Artificial Sequence
  Description of Artificial Sequence: Synthetic primer
aaggtcagctagtccca

SEQ ID NO: 2026 - DNA, 17 bp, Artificial Sequence
  Description of Artificial Sequence: Synthetic primer
gggaaggccagcacagg

SEQ ID NO: 2027 - DNA, 17 bp, Artificial Sequence
  Description of Artificial Sequence: Synthetic primer
aggtgcagggaaagaag

SEQ ID NO: 2028 - DNA, 17 bp, Artificial Sequence
  Description of Artificial Sequence: Synthetic primer
cagcatctcccacagcc

SEQ ID NO: 2029 - DNA, 17 bp, Artificial Sequence
  Description of Artificial Sequence: Synthetic primer
gcttgggaaggtcatca

SEQ ID NO: 2030 - DNA, 17 bp, Artificial Sequence
  Description of Artificial Sequence: Synthetic primer
tgtgtgccaggcatcgc

SEQ ID NO: 2031 - DNA, 19 bp, Artificial Sequence
  Description of Artificial Sequence: Synthetic primer
gataaacgagagaatgtgg

SEQ ID NO: 2032 - DNA, 19 bp, Artificial Sequence
  Description of Artificial Sequence: Synthetic primer
ggaagcaaaagcatttact

SEQ ID NO: 2033 - DNA, 18 bp, Artificial Sequence
  Description of Artificial Sequence: Synthetic primer
gtgccccagaaagaggag

SEQ ID NO: 2034 - DNA, 17 bp, Artificial Sequence
  Description of Artificial Sequence: Synthetic primer
gtgaggcaggagccagc

SEQ ID NO: 2035 - DNA, 17 bp, Artificial Sequence
  Description of Artificial Sequence: Synthetic primer
cacccagactggtgcct

SEQ ID NO: 2036 - DNA, 17 bp, Artificial Sequence
  Description of Artificial Sequence: Synthetic primer
ccttgggaggaaggtgc

SEQ ID NO: 2037 - DNA, 17 bp, Artificial Sequence
  Description of Artificial Sequence: Synthetic primer
taactcagccacgatga

SEQ ID NO: 2038 - DNA, 18 bp, Artificial Sequence
  Description of Artificial Sequence: Synthetic primer
gcatcttggctcttattg

SEQ ID NO: 2039 - DNA, 17 bp, Artificial Sequence
  Description of Artificial Sequence: Synthetic primer
acagccaggacacagag

SEQ ID NO: 2040 - DNA, 21 bp, Artificial Sequence
  Description of Artificial Sequence: Synthetic primer
cagatacaagatgaatacacc

SEQ ID NO: 2041 - DNA, 17 bp, Artificial Sequence
  Description of Artificial Sequence: Synthetic primer
tcggtggaaacatctgc

SEQ ID NO: 2042 - DNA, 17 bp, Artificial Sequence
  Description of Artificial Sequence: Synthetic primer
gacccccaatgtctgcc

SEQ ID NO: 2043 - DNA, 17 bp, Artificial Sequence
  Description of Artificial Sequence: Synthetic primer
gccaccttgcatgacaa

SEQ ID NO: 2044 - DNA, 17 bp, Artificial Sequence
  Description of Artificial Sequence: Synthetic primer
gagttccatttagggtg

SEQ ID NO: 2045 - DNA, 20 bp, Artificial Sequence
  Description of Artificial Sequence: Synthetic primer
caataggatatttctcctgc

SEQ ID NO: 2046 - DNA, 17 bp, Artificial Sequence
  Description of Artificial Sequence: Synthetic primer
ccccaccacatcttctc

SEQ ID NO: 2047 - DNA, 18 bp, Artificial Sequence
  Description of Artificial Sequence: Synthetic primer
gcaatgtgatatcatggc

SEQ ID NO: 2048 - DNA, 17 bp, Artificial Sequence
  Description of Artificial Sequence: Synthetic primer
tctcaggcaaatgactt

SEQ ID NO: 2049 - DNA, 20 bp, Artificial Sequence
  Description of Artificial Sequence: Synthetic primer
ctctagattcctagataggg

SEQ ID NO: 2050 - DNA, 18 bp, Artificial Sequence
  Description of Artificial Sequence: Synthetic primer
acaaaccaccattcattc

SEQ ID NO: 2051 - DNA, 17 bp, Artificial Sequence
  Description of Artificial Sequence: Synthetic primer
tgctctgcctcccaaag

SEQ ID NO: 2052 - DNA, 20 bp, Artificial Sequence
  Description of Artificial Sequence: Synthetic primer
tgatgaaggagaaatttcaa

SEQ ID NO: 2053 - DNA, 18 bp, Artificial Sequence
  Description of Artificial Sequence: Synthetic primer
tcactcttcagattggaa

SEQ ID NO: 2054 - DNA, 19 bp, Artificial Sequence
  Description of Artificial Sequence: Synthetic primer
aaatcatcaagaacttccc

SEQ ID NO: 2055 - DNA, 20 bp, Artificial Sequence
  Description of Artificial Sequence: Synthetic primer
gaatgaaaatgtttcactct

1. A method for identifying a subject at risk of low bone mineral density (BMD), which comprises detecting the presence or absence of one or more polymorphic variations associated with low BMD in a nucleic acid sample from a subject, wherein the one or more polymorphic variations are detected in a nucleotide sequence in SEQ ID NOs:1-5, a substantially identical sequence thereof or a fragment of the foregoing; whereby the presence of the polymorphic variation is indicative of the subject being at risk of low BMD.

2. The method of claim 1, which further comprises obtaining the nucleic acid sample from the subject.

3. The method of claim 1, wherein the one or more polymorphic variations are detected at one or more positions selected from the group consisting of rs7500979, rs2217332, rs8044804, rs2270835, rs2133783, rs247609, rs952440, rs881598, rs2291955, rs2518054, rs866038, rs1436425, rs173537, rs247611, rs166017, rs173538, rs193694, rs7205692, rs8048746, rs247618, rs183130, rs6499863, rs4783961, rs3816117, rs711752, rs708272, rs1864163, rs4369653, rs1864165, rs891141, rs891143, rs7205804, rs5885, rs1532625, rs1532624, rs289712, rs7499892, rs5883, rs289714, rs158480, rs289717, rs4344729, rs289718, rs289719, rs2033254, rs4784744, rs291044, rs8053613, rs5881, rs5880, rs7198026, rs5882, rs8045701, rs289741, rs1801706, rs289742, rs289743, rs289746, rs172337, rs289747, rs1566439, rs7205459, rs289749, rs289751, rs8059220, rs8058353, rs289735, rs289737, rs291042, rs1875236, rs821466, rs821465, rs4275846, rs289707, rs821463, rs289706, rs1167741, rs2052880, rs1167742, rs1183256, rs1651665, rs1651666, rs4784751, rs1651667, rs8052091, rs1684574, rs1684575, rs1672865, rs821470, rs1549669, rs291040 and rs289754.

4. The method of claim 1, wherein the one or more polymorphic variations are detected at one or more positions selected from the group consisting of rs166017, rs193694, rs7205804, rs1801706, rs7205459 and rs821465.

5. The method of claim 1, wherein the one or more polymorphic variations are detected in a region spanning positions 14,328 to 68,805 in SEQ ID NO: 1.

6. The method of claim 1, wherein the one or more polymorphic variations are detected at one or more positions selected from the group consisting of rs523051, rs693620, rs2588349, rs2588350, rs619381, rs3759252, rs3759251, rs2418107, rs7303054, rs1838345, rs620878, rs2537817, rs1548803, rs667123, rs1838346, rs2159903, rs3944035, rs3741845, rs2110096, rs759055, rs589377, rs7960194, rs7978242, rs601051, rs4262797, rs2215714, rs1373434, rs2215715, rs612456, rs612808, rs689118, rs597468, rs592864, rs640372, rs7966559, rs654834, rs4763216, rs668521, rs669503, rs3906864, rs3906863, rs7957888, rs9300230, rs7306214, rs763839, rs2418105, rs666841, rs3851578, rs7138797, rs7295252, rs2418106, rs7299578, rs621112, rs3863320, rs1373432, rs1047699, rs1063193, rs2232959, rs2227296, rs1548804, rs2232958, rs2232957, rs2232956, rs1972571, rs3759250, rs3759249, rs1541525, rs2098248, rs2900550, rs7302130, rs4763583, rs4360778, rs1607695, rs1607694, rs2192139, rs7978300, rs7397871, rs4763217, rs2159900, rs10772370, rs7398682, rs2900551, rs2900552, rs2418214, rs2418215, rs965243, rs1117548, rs1520225, rs1520226, rs1520227, rs971919, rs2159901, rs2159902, rs2110099, rs7314847, rs7296003, rs4281556, rs4763219, rs3851579, rs3851580, rs1049119, rs2298866, rs2298865, rs2298864, rs2298863, rs3180393, rs2070837, rs7956204, rs2418216, rs3741844, rs4262798, rs2418217, rs2418218, rs7137492, rs2110100, rs1013312, rs4579993, rs1013313, rs7397106, rs2215716, rs2192140, rs4763589, rs1468697, rs2070837, rs3180393 and rs2298865.

7. The method of claim 1, wherein the one or more polymorphic variations are detected at one or more positions selected from the group consisting of rs2588350, rs619381, rs620878, rs759055, rs4262797, rs612808, rs3906863, rs7957888, rs763839, rs2418105, rs666841, rs3851578, rs7299578, rs621112, rs1047699, rs1548804, rs2232956, rs1520227 and rs2215716.

8. The method of claim 1, wherein the one or more polymorphic variations are detected in a region spanning positions 2,424 to 93,715 in SEQ ID NO: 2.

9. The method of claim 1, wherein the one or more polymorphic variations are detected at one or more positions selected from the group consisting of rs1433661, rs1485009, rs7681947, rs1816432, rs1485018, rs1485017, rs7438397, rs6834311, rs1368717, rs1017391, rs2870701, rs7679839, rs1385404, rs1368716, rs4693316, rs1905707, rs1905708, rs1905709, rs3912442, rs2082553, rs6831638, rs5860329, rs2870702, rs2870703, rs1948016, rs6835836, rs1994253, rs1905710, rs1485019, rs978191, rs1385405, rs7694361, rs1905711, rs1905734, rs1485012, rs1485013, rs4692981, rs7670552, rs7670932, rs7688091, rs7440540, rs2171000, rs2870704, rs7655758, rs7661436, rs7662289, rs7667044, rs7691929, rs5860330, rs901013, rs901012, rs901011, rs1948018, rs2870705, rs1948017, rs1905733, rs1385408, rs1385409, rs1385410, rs1485026, rs1485027, rs2904483, rs1385406, rs1905732, rs2046418, rs2200377, rs1905731, rs1905730, rs975713, rs6820985, rs7670441, rs6810794, rs7676623, rs1154861, rs1032125, rs1485022, rs1485024, rs3913651, rs4693319, rs1872383, rs2200376, rs7668090, rs7692930, rs967096, rs6822249, rs6532405, rs1017897, rs7672674, rs7694568, rs2904484, rs7340830, rs1485033, rs2870706, rs1905729, rs4693320, rs6848749, rs6532406, rs6532407, rs1905728, rs6819866, rs1905727, rs7674069, rs1905724, rs1905723, rs1485020 and rs6814101.

10. The method of claim 1, wherein the one or more polymorphic variations are detected at one or more positions selected from the group consisting of rs1433661, rs7679839, rs1368716, rs1905707, rs1905708, rs1994253, rs1485019, rs1905734, rs1485012, rs7670552, rs7691929, rs1948018, rs1948017, rs1485024, rs7694568, rs4693320, rs6848749, rs6532406, rs6532407 and rs6819866.

11. The method of claim 1, wherein the one or more polymorphic variations are detected in a region spanning positions 206 to 90,969 in SEQ ID NO: 3.

12. The method of claim 1, wherein the one or more polymorphic variations are detected at one or more positions selected from the group consisting of rs6886495, rs6450498, rs1472456, rs4700315, rs4700316, rs7714708, rs7710479, rs2968013, rs2968014, rs2968015, rs1391648, rs2055297, rs2055296, rs3989138, rs4700317, rs2036220, rs7727206, rs7723432, rs1546221, rs4479801, rs4395595, rs4395596, rs4699932, rs2936201, rs7356672, rs2936200, rs1909296, rs7703131, rs7445308, rs3087748, rs4321723, rs2968016, rs5868151, rs1874858, rs1874857, rs7712922, rs4631140, rs4469166, rs1078369, rs1078368, rs2968006, rs2968005, rs2936190, rs2409613, rs4415048, rs2968004, rs2968003, rs2968002, rs2936191, rs1498610, rs6874662, rs3060393, rs7729722, rs7733884, rs7714489, rs7735570, rs2936193, rs2291851, rs2291852, rs1498602, rs1995166, rs1498603, rs1498604, rs1498605, rs1948651, rs4699934, rs4700319, rs2279737, rs7720361, rs7706419, rs1006431, rs1353747, rs1498606, rs1353748, rs1553113, rs2968012, rs2968011, rs1498608, rs2936189, rs1498609, rs2968019, rs6891238, rs2968010, rs2968009, rs2936203, rs1498601, rs1498600, rs1498599, rs2936202, rs7730070, rs6450501, rs6450502, rs6889456, rs6894618, rs7706044, rs7707541, rs7712076, rs6892860, rs6867053, rs7737269, rs6864156, rs950447, rs2936196, rs7719347, rs1391649, rs1391650, rs1391651, rs1353749, rs10682149, rs5868153, rs1363882, rs2409626, rs2968018, rs954740, rs986067, rs6869400, and rs5010782.

13. The method of claim 1, wherein the one or more polymorphic variations are detected at one or more positions selected from the group consisting of rs7714708, rs1498602, rs4699934, rs1006431, rs1353747, rs1498608, rs1498609, rs2968010, rs2936202 and rs1391649.

14. The method of claim 1, wherein the one or more polymorphic variations are detected in a region spanning positions 1,599 to 82,591 in SEQ ID NO: 4.

15. The method of claim 1, wherein the one or more polymorphic variations are detected at one or more positions selected from the group consisting of rs1478398, rs1478397, rs1160114, rs1160113, rs1382323, rs1160112, rs7709870, rs7710643, rs7730467, rs6579829, rs6579830, rs6579831, rs6896232, rs1351131, rs1038074, rs1478396, rs6880512, rs4958858, rs4958431, rs4958432, rs6898463, rs4958859, rs4130064, rs4130065, rs4133119, rs4958860, rs4958861, rs4437356, rs4958868, rs1478400, rs6889375, rs1600159, rs6875892, rs4608909, rs2345000, rs4516840, rs2054440, rs707141, rs707142, rs841236, rs707143, rs707144, rs6869405, rs707145, rs707146, rs707148, rs707150, rs5872184, rs3763015, rs2042235, rs3763013, rs2042236, rs1946234, rs1946235, rs1946236, rs8177402, rs8177403, rs8177404, rs8177405, rs8177406, rs8177407, rs8177408, rs8177409, rs6888961, rs8177410, rs8177411, rs8177412, rs8177413, rs870407, rs870406, rs6873202, rs8177414, rs8177415, rs3805435, rs8177416, rs3792799, rs3792798, rs3828599, rs8177417, rs3792797, rs8177418, rs8177419, rs8177420, rs8177421, rs4958872, rs3792796, rs8177422, rs8177423, rs4958434, rs8177424, rs8177425, rs8177426, rs8177427, rs8177429, rs6889737, rs3792795, rs8177430, rs8177431, rs4958873, rs8177432, rs8177433, rs8177434, rs8177435, rs3763011, rs8177436, rs8177437, rs4958874, rs8177439, rs8177440, rs8177441, rs8177442, rs8177443, rs869975, rs869976, rs8177444, rs8177445, rs7721469, rs8177446, rs7704191, rs8177447, rs11548, rs2230303, rs7722386, rs8177448, rs8177449, rs2070593, rs8177450, rs8177451, rs8177452, rs8177453, rs8177454, rs3763010, rs8177455, rs8177456, rs736775, rs2277940, rs8177458, rs8177834, rs3924, rs2233312, rs2233311, rs2233310, rs2233309, rs4958875, rs2233308, rs2233307, rs2233306, rs2233305, rs2233304, rs2233303, rs2233302, rs2287719, rs2287720, rs7727034, rs7727250, rs7709800, rs3840312, rs2287721, rs6875293, rs3805434, rs2080982, rs2080983, rs2287722, rs2233301, rs2233300, rs4958876, rs2233299, rs2233298, rs2287723, rs2161359, rs7734456, rs4292439, rs4958878, rs6862024, rs3834819, rs2233297, rs2233296, rs2233295, rs2233294, rs7713028, rs7713223, rs7713567, rs888989, rs2233293, rs3749657, rs2233292, rs2112635, rs871269, rs3792794, rs6579837, rs3805433, rs5872186, rs2233291, rs2233290, rs2233289, rs4958435, rs4958880, rs1422673, rs2042234, rs3805432, rs3805431, rs2233288, rs2233287, rs3815720, rs3792792, rs3792791, rs2303018, rs3792790, rs4958436, rs2233286, rs2233285, rs7732451, rs2233284, rs1422674, rs3792789, rs4562032, rs6865077, rs1559126, rs3792788, rs1559127, rs3792786, rs6880110, rs6861227, rs3805430, rs1862364, rs4958881, rs3792785, rs6869605, rs6870205, rs4246047, rs4958882, rs3792784, rs3792783 and rs5872188.

16. The method of claim 1, wherein the one or more polymorphic variations are detected at one or more positions selected from the group consisting of rs1478398, rs1160114, rs1160113, rs1160112, rs4958858, rs4958431, rs6898463, rs4958859, rs4958860, rs4608909, rs707144, rs2042235, rs3763013, rs2042236, rs8177404, rs8177426, rs8177427, rs8177429, rs3792795, rs4958873, rs8177437, rs869975, rs8177447, rs11548, rs2277940, rs8177834, rs2233311, rs2233302, rs7727034, rs7727250, rs3805434, rs7734456, rs7713028, rs7713223, rs888989, rs3792794, rs4958880, rs1422673, rs3805432 and rs4958436.

17. The method of claim 1, wherein the one or more polymorphic variations are detected in a region spanning positions 231 to 86,539 in SEQ ID NO: 5.

18. The method of claim 1, wherein the one or more polymorphic variations are detected at one or more positions in linkage disequilibrium with one or more positions selected from the grout consisting of rs7500979, rs2217332, rs8044804, rs2270835, rs2133783, rs247609, rs952440, rs881598, rs2291955, rs2518054, rs866038, rs1436425, rs173537, rs247611, rs166017, rs173538, rs193694, rs7205692, rs8048746, rs247618, rs183130, rs6499863, rs4783961, rs3816117, rs711752, rs708272, rs1864163, rs4369653, rs1864165, rs891141, rs891143, rs7205804, rs5885, rs1532625, rs1532624, rs289712, rs7499892, rs5883, rs289714, rs158480, rs289717, rs4344729, rs289718, rs289719, rs2033254, rs4784744, rs291044, rs8053613, rs5881, rs5880, rs7198026, rs5882, rs8045701, rs289741, rs1801706, rs289742, rs289743, rs289746, rs172337, rs289747, rs1566439, rs7205459, rs289749, rs289751, rs8059220, rs8058353, rs289735, rs289737, rs291042, rs1875236, rs821466, rs821465, rs4275846, rs289707, rs821463, rs289706, rs1167741, rs2052880, rs1167742, rs1183256, rs1651665, rs1651666, rs4784751, rs1651667, rs8052091, rs1684574, rs1684575, rs1672865, rs821470, rs1549669, rs291040 and rs289754.

19. The method of claim 1, wherein detecting the presence or absence of the one or more polymorphic variations comprises:
hybridizing an oligonucleotide to the nucleic acid sample, wherein the oligonucleotide is complementary to a nucleotide sequence in the nucleic acid and hybridizes to a region adjacent to the polymorphic variation;
extending the oligonucleotide in the presence of one or more nucleotides, yielding extension products; and
detecting the presence or absence of a polymorphic variation in the extension products.

20. The method of claim 1, wherein the subject is a human.

21-55. (canceled)
